(19) United States
(12) Patent Application Publication
(10) Pub. No.: US 2022/0259570 A1
(43) Pub. Date: Aug. 18, 2022

(54) Genetically Engineered Bacteriophage

(71) Applicant: Cytophage Technologies, Ile Des Chenes East (CA)

(72) Inventor: Steven Theriault, Ile Des Chenes East (CA)

(21) Appl. No.: 17/627,817

(22) PCT Filed: Jul. 18, 2019
(86) PCT No.: PCT/CA2019/050992

§ 371 Date: Jan. 18, 2022

(51) Int. Cl. C12N 7/00; C12N 9/80; C12N 9/36; C07K 14/005

(52) U.S. Cl. CPC C12N 7/00; C12N 9/80; C12Y 305/01003; C12N 2795/00051; C12Y 302/01017; C07K 14/005; C12N 9/2462

(57) ABSTRACT

A method of engineering bacteriophages comprising isolating a bacteriophage; removing all attachment genes from a genome of said bacteriophage; inserting a first unique open reading frame encoding one or more attachment genes and inserting a second unique open reading frame encoding one or more genes useful for overcoming bacterial defenses; and inserting a non-natural attachment gene into said first open reading frame, wherein said non-natural attachment gene is specific for attaching to a selected bacteria.

### FIELD OF THE INVENTION

[0001] Prevention, diagnostics and treatment of human, animal, and plant bacterial infections.

### BACKGROUND

[0002] Bacteria are unicellular, biological entities that are mostly not harmful to humans—less than one percent of the different types make people sick. Many bacterial species are beneficial to humans, such as those that help to digest food, destroy disease-causing cells, and provide needed vitamins.

[0003] Infectious bacteria (the harmful one percent) cause illness in humans and animals. They reproduce quickly in the body and produce toxic proteins that cause tissue damage and illness.

[0004] Bacteriophages (also referred to as phages) were discovered by Ernest Hankin in 1896, and utilized as antibacterials against cholera. These bacteria-specific viruses can infect and destroy bacterial cells.

[0005] Bacteriophages are composed of proteins that encapsulate a DNA or RNA genome. Bacteriophages replicate within bacterium by injecting their viral genetic material (DNA or RNA) into the host cell effectively taking over the cells functions for the production of progeny bacteriophage leading to the rupture of the cell wall and subsequent bacterial cell death.

[0006] Bacteriophages continued to be used as antibacterials until the 1930's. However, it was found that bacteria naturally build up resistance to bacteriophages. With the introduction of chemical antibiotics, use of bacteriophages was abandoned.

[0007] While antibiotics are the usual treatment, bacterial mutations conferring antibiotic resistance are becoming increasingly common in pathogenic bacteria world-wide. Methicillin-resistant Staphylococcus aureus (MRSA) bacteria, for example, is an increasingly common form of infection, often acquired through transmission in hospitals. MRSA infections are extremely difficult to treat using conventional antibiotics.

[0008] Bacteriophages can be very specific to the type of disease-causing bacterial species. Most bacteriophages have structures that enable it to bind to specific molecules on the surface of their target bacteria.

[0009] A key advantage of bacteriophages is that they enable the elimination of antibiotic-resistant bacteria without the need for increasingly toxic antibiotics or harmful or irritating chemical-exposure to humans, animals and the environment (see, e.g. U.S. Pat. No. 6,699,701 to Intralytix).

[0010] In natural settings, bacteriophages can be isolated from the environment in which the particular bacterium grows following a paired relationship, for example from sewage or feces. Repositories of different types of natural bacteriophages have been created to provide access to bacteriophages to treat difficult infections by specific bacterial species.

[0011] One problem with using bacteriophages has been that the patient's own body will often have an immune response against the bacteriophages and eliminate the bacteriophages from blood. U.S. Pat. Nos. 5,660,812, 5,688,501, 5,811,093 and U.S. Pat. No. 5,766,892 all show methods of selecting or generating (using mutations) bacteriophages to improve the bacteriophage half-life within the blood of a patient to be treated.

[0012] Another problem associated with prior uses of phages to disinfect or treat bacterial contaminants or diseases, are that bacteria can become resistant to bacteriophages. The presence of, for example, a prophage within a bacterium may block the expression of genes from an infectious bacteriophage, thus preventing replication of the infectious bacteriophage and preventing lysis and killing of the bacterium. A prophage may also cause the destruction of incoming phage DNA.

[0013] This has previously meant that either the bacteriophage needs to be matched to the bacterium, often requiring complicated genetic analysis of the bacterium, or a number of different phages need to be used in combination. The production of panels of different bacteriophages, such as panels of vir mutants derived from temperate bacteriophage, is disclosed in WO 03/080823.

[0014] Currently, only natural bacteriophages exist, and natural bacteriophages that have been mutated and selected for specificity against certain bacteria (see, e.g. U.S. Pat. No. 8,685,697 to Intralytix).

### SUMMARY OF INVENTION

[0015] The invention is a template or platform technology for creating customized genetically modified bacteriophages that target and destroy specific bacterial organisms found in humans, animals and agricultural crops, as well as on surfaces in healthcare or food processing facilities.

[0016] Specific products can be developed using this template technology such as a disinfectant spray for MRSA, food additive to prevent antibiotic use in animal feed, and treatment of bacterial infections in humans. The invention thus encompasses genetically modified bacteriophages as well as including gene products derived from bacteriophages, used to treat and or remove bacterial infections utilizing bacteriophages.

[0017] According to one aspect, there is disclosed a method to manipulate the viral genome to cause functional changes in the life cycle of the virus.

[0018] In one embodiment, the invention provides a method of engineering bacteriophages comprising:
[0019] isolating a bacteriophage;
[0020] removing any attachment gene from a genome of said bacteriophage;
[0021] inserting a first unique open reading frame encoding one or more attachment genes and inserting a second unique open reading frame encoding one or more genes useful for overcoming bacterial defenses;
[0022] inserting a non-natural attachment gene into said first open reading frame, wherein said non-natural attachment gene is specific for attaching to a selected bacteria. The one or more genes useful for overcoming bacterial defenses are endolysins, bio-file reducers, glycocalyx penetrators, or any combination thereof.

[0023] In another embodiment, the invention provides a method of engineering bacteriophages comprising:
[0024] isolating a bacteriophage;
[0025] removing any attachment gene from a genome of said bacteriophage;
[0026] inserting a multiple restriction enzyme cassette in said genome; and
[0027] inserting a non-natural attachment gene into said cassette, wherein said non-natural attachment gene is specific for attaching to a selected bacteria.

[0028] The bacteriophage may comprise a non-native attachment gene, wherein said non-native attachment gene is specific for attaching to a selected bacteria. The bacteriophage may have no native attachment genes. The bacteriophage may be lytic. The non-native attachment gene is specific for pathogenic/non-pathogenic bacteria. The bacteriophage may be used for cleaning, treating, or preventing a bacterial contaminant.

[0029] The invention also teaches bacteriophage for diagnosis of the presence or absence of a specific bacteria.

[0030] The invention also teaches a method of producing a mutant bacteriophage, the method comprising inactivating an attachment gene from a selected bacteriophage, the selected bacteriophage being isolated from bacteriophages from the environment; inserting, into the selected bacteriophage, a first heterologous nucleic acid sequence comprising a first open reading frame encoding a first specific attachment gene, the first specific attachment gene being different than the inactivated attachment gene and being specific for a selected bacteria, to produce the mutant bacteriophage. A second heterologous nucleic acid sequence may be inserted in a second open reading frame encoding a gene useful for overcoming bacterial defenses. The gene for overcoming bacterial defenses may be a biofilm degrading gene, a glycocalyx degrading gene, a gene encoding an antibacterial protein, and a gene for an enzyme that disrupts the bacterial wall, to produce the mutant bacteriophage. The step of inactivating may inactivate all attachment genes from the selected bacteriophage.

[0031] The invention also teaches a bacteriophage which is a lytic bacteriophage, a bateriohage with a small genome size, or a bacteriophage with structural and functional genes to lyse gram negative and gram-positive bacteria, or any combination thereof.

[0032] The invention also teaches an anti-microbial composition for sanitizing or decontaminating a surface.

[0033] The invention also teaches a method of eliminating a microbial contaminant, the method comprising: obtaining one or more lytic enzymes produced by the mutant bacteriophage; applying the one or more lytic enzymes to a bacterial contaminant, without prior infection of the bacterial contaminant with a bacteriophage, to eliminate the bacterial contaminant.

### BRIEF DESCRIPTION OF THE DRAWINGS

[0034] FIG. 1 shows an overview of a phage engineering platform, according to an embodiment of the present invention.

[0035] FIG. 2 shows an overview of a method to generate mutant bacteriophage using a cell free cloning method, according to an embodiment of the present invention.

[0036] FIG. 3 shows an overview of a method to generate mutant bacteriophages using yeast strain, according to an embodiment of the present invention.

[0037] FIG. 4 is an agarose plate of the titration of pp8 against E.coli DH5 alpha after rescue from the genetic template. Phage was spot plated on a lawn of E. coli. Concentration was determined to be 10⁸ for isolate one and 10⁶ for isolate two phage units per 10 ul.

[0038] FIG. 5 shows a schematic representation of the entire genome of the disclosed mutant bacteriophage, according to an embodiment of the present invention.

[0039] FIG. 6 shows the nucleotide sequence of the entire genome of PP8 and the proteins encoded therein along with the restriction endonuclease sites according to an embodiment of the present invention.

[0040] FIG. 7 is a detailed description of the PP8 molecule and proteins with annotations according to an embodiment of the present invention.

[0041] FIG. 8 is a gel electrophoresis photograph of PP8 DNA digestion using enzymes specific to remove inserts. EcoRI for ORF1 and ORF2 and TspRI for ORF3 and ORF4, where Lane 1: 1 kb DNA ladder (NEB), Lane 2: space, Lane 3: undigested PP8 DNA, Lane 4: Digested PP8 ORF1 insertion SP5 attachment gene (46090) band size 1.1 kb, Lane 5: Digested PP8 ORF2 insertion Endolysis gene (73195) band size 2.1, Lane 6: Digested PP8 ORF3 insertion SP6 attachment gene (19991) band size 1.2 kb, Lane 7: Digested PP8 ORF4 insertion endolysis gene (60431) band size 2.1

[0042] FIG. 9a—Shows a gel electrophoresis photograph where Lane 1: 1 kb DNA ladder (NEB), 2: space, 3: Extracted bacteriophage genome control, 4: Bacteria control (mock—bacteriophage infected), 5-7: Purified bacterial colonies with potential integration. Expected band size: 554 bases.

[0043] FIG. 9b—is a gel electrophoresis photograph where Lane 1: Extracted bacteriophage genome control, 2: Bacteria control (mock—bacteriophage infected), 3-5: Purified bacterial colonies with potential integration. Expected band size: 613 bases.

[0044] FIG. 10 shows an overview of the disclosed method for modifying the binding sites, according to an embodiment of the present invention.

[0045] FIG. 11 shows the results of the MRSA phage treatment experiment where bacteriophage PP8 (SR5) insertion lysis of MRSA patient samples 1-6. Bacteriophage at a concentration of 10⁷ was used to develop a kill curve of 6 MRSA positive patient samples. These samples were named patient 1-6.

[0046] FIG. 12 shows the titration of PP8/SP5 against Staphylococcus aureus. Phage was spot plated on a lawn of Staphylococcus aureus. Concentration was determined to be 10⁵ phage units per 10 ul.

[0047] FIG. 13 shows the titration of PP8/SP6 against Staphylococcus aureus. Phage was spot plated on a lawn of Staphylococcus aureus. Concentration was determined to be 10⁸ phage units per 10 ul.

[0048] FIG. 14 shows the results of the new MRSA phage treatment where PP8 (SR5, SR6) insertion kill curve of MRSA patient samples 1-6. Bacteriophage at a concentration of 10⁵ were used to develop a kill curve of 6 MRSA positive patient samples. Patient samples were tested for survivability at a concentration of 10⁶.

[0049] FIG. 15 is a photograph showing a PP8 SP5/SP6 bacterial challenge. Bacteriophage PP8 SP5/SP6 was flooded onto the agarose plate. Bacterial strains were tested for lysis. 50) E. coli O9 51) E.coli O1 52) E.coli O28 53) E.coli DH5 alpha 54) Salmonella enterica 55) Listeria monocytogenes 56) Entercoccus durans 57-61) MRSA patient sample 1-5 respectively.

[0050] FIG. 16 shows an overview of a phage engineering platform for engineering phages with E. Coli, Salmonella, and Clostridium specific binding domains and endolysin genes, according to an embodiment of the present invention.

[0051] FIG. 17 shows an overview of a phage engineering platform for engineering phages with E. Coli, Salmonella, and Clostridium specific identified binding domains and identified endolysin genes or engineering a phage with T7 tail fibre and GFP, according to an embodiment of the present invention.

[0052] FIG. 18 shows an agarose gel of tail fiber genes digested for insertion into PP8 genetic template.

[0053] FIG. 19 shows an agarose gel of PP8 digests to confirm insertion of specific tail fibers.

[0054] FIG. 20 shows the titration of a PP2/PP8 genetic template with E.coli tail fiber insertion on an E. coli lawn.

[0055] FIG. 21 shows the titration of a PP8 genetic template with Salmonella typhimurium strain A3 tail fiber insertion.

[0056] FIG. 22 shows the titration of a PP8 genetic template with Clostridium perfringens CPS2 tail fiber insertion.

### DETAILED DESCRIPTION

[0057] The methods and techniques of the present disclosure are generally performed according to conventional methods well known in the art and as described in various general and more specific references that are cited and discussed throughout the present specification unless otherwise indicated.

[0058] The terms “polypeptide”, “peptide”, and “protein” are typically used interchangeably herein to refer to a polymer of amino acid residues. Amino acids may be referred to herein by either their commonly known three letter symbols or by the one-letter symbols recommended by the IUPAC-IUB Biochemical Nomenclature Commission. Each protein or polypeptide will have a unique function. The invention includes polypeptides and functional fragments thereof, as well as mutants and variants having the same biological function or activity.

[0059] In some embodiments, polymeric molecules (e.g., a polypeptide sequence or nucleic acid sequence) are considered to be “homologous” to one another if their sequences are at least 25%, at least 30%, at least 35%, at least 40%, at least 45%, at least 50%, at least 55%, at least 60%, at least 65%, at least 70%, at least 75%, at least 80%, at least 85%, at least 90%, at least 95%, or at least 99% identical.

[0060] In some embodiments a fragment of a nucleic acid sequence is a fragment of an open reading frame sequence. In some embodiments, such a fragment encodes a polypeptide fragment (as defined herein) of the protein encoded by the open reading frame nucleotide sequence.

[0061] The term “nucleic acid fragment” as used herein refers to a nucleic acid sequence that has a deletion. In some embodiments a fragment of a nucleic acid sequence is a fragment of an open reading frame sequence. In some embodiments, such a fragment encodes a polypeptide fragment (as defined herein) of the protein encoded by the open reading frame nucleotide sequence.

[0062] The term “construct” refers to a nucleic acid sequence encoding a protein, operably linked to a promoter and/or other regulatory sequences.

[0063] The term “genomic sequence” refers to a sequence having non-contiguous open reading frames, where introns interrupt the protein coding regions.

[0064] As used herein, the terms “encoding”, “coding”, or “encoded” when used in the context of a specified nucleic acid mean that the nucleic acid comprises the requisite information to guide translation of the nucleotide sequence into a specified protein. The information by which a protein is encoded is specified by the use of codons. A nucleic acid encoding a protein may comprise non-translated sequences (e.g., introns) within translated regions of the nucleic acid or may lack such intervening non-translated sequences (e.g., as in cDNA).

[0065] The term “percent sequence identity” or “identical” in the context of nucleic acid sequences refers to the residues in the two sequences which are the same when aligned for maximum correspondence. For instance, polynucleotide sequences can be compared using the computer program, BLAST (Altschul et al., J. Mol. Biol. 215:403-410 (1990); Gish and States, Nature Genet. 3:266-272 (1993).

[0066] The term “substantial homology” or “substantial similarity,” when referring to a nucleic acid or fragment thereof, indicates that, when optimally aligned with appropriate nucleotide insertions or deletions with another nucleic acid (or its complementary strand), there is nucleotide sequence identity in at least about 70%, 80%, 85%, or at least about 90%, or at least about 95%, 96%, 97%, 98% or 99% of the nucleotide bases, as measured by any well-known algorithm of sequence identity, such as BLAST, as discussed above.

[0067] As used herein, “heterologous nucleic acid sequence” is any sequence placed at a location in the genome where it does not normally occur. In some embodiments, the heterologous nucleic acid sequence is a natural phage sequence, albeit from a different phage.

[0068] A particular nucleic acid sequence also encompasses conservatively modified variants thereof (such as degenerate codon substitutions) and complementary sequences, as well as the sequence explicitly indicated. Thus, a nucleic acid sequence encoding a protein sequence disclosed herein also encompasses modified variants thereof as described herein. Substantially similar nucleic acid fragments of the instant invention may also be characterized by the percent identity of the amino acid sequences that they encode to the amino acid sequences disclosed herein, as determined by algorithms commonly employed by those skilled in this art.

[0069] An “orgin bacteriophage” is a phage isolated from a natural or human made environment that has not been modified by genetic engineering. A “mutant bacteriophage” is a bacteriophage that comprises a genome that has been genetically modified by insertion of a heterologous nucleic acid sequence into the genome, or the genome of the phage. In some embodiments the genome of a origin bacteriophage is modified by recombinant DNA technology to introduce a heterologous nucleic acid sequence into the genome at a defined site.

[0070] “Operatively linked” or “operably linked” expression control sequences refers to a linkage in which the expression control sequence is contiguous with coding sequences of interest to control expression of the coding sequences of interest, as well as expression control sequences that act in trans or at a distance to control expression of the coding sequence.

[0071] A “coding sequence” or “open reading frame” is a sequence of nucleotides that encodes a polypeptide or protein. The termini of the coding sequence are a start codon and a stop codon. The disclosure also includes native, isolated, or recombinant nucleic acid sequences encoding a protein, as well as vectors and/or (host) cells containing the coding sequences for the protein.

[0072] Fragments and variants of the disclosed nucleotide sequences and proteins encoded thereby are also encompassed by the present invention. By “fragment” a portion of the nucleotide sequence or a portion of the amino acid sequence and hence protein encoded thereby is intended. Fragments of a nucleotide sequence may encode protein fragments that retain the biological activity of the native protein. Accordingly, the present disclosure relates to any nucleic acid fragment comprising a nucleotide sequence that encodes all or a substantial portion of the amino acid sequences encoded thereby.

[0073] The present technology uses synthetic biology to generate bacteriophages that can bind to specific bacterial strains. Since bacteriophages must attach to host bacterial cells to initiate infection of the bacteria, genetic selections or manipulations in the viral DNA or RNA can define binding characteristics, thus expanding the range of host cells beyond the natural paired relationship. According to one embodiment there some characteristics of the disclosed bacteriophages, including the following.

[0074] The phages are safe, non-corrosive, and non-toxic. The phages can be engineered so that they do not affect helpful bacteria, animal or human cells. Thus, there is no interference with the food chain, as with antibiotics.

[0075] The phages are designed, not discovered in nature. Thus, the technology is adaptable to any bacterial infection. Undesirable genetic components are eliminated. In contrast, the present methods of isolating natural phages for specific bacteria is like finding a “needle in a haystack” for target bacteria.

[0076] The phages are engineered to avoid mutation/adaptation of target bacteria resulting in superior kill rates and no resistance. Accordingly, the phages have superior efficacy over known phages. The phages also prevent biofilm formation.

[0077] According to one embodiment, the platform is versatile. The disclosed bacteriophages can be used to solve any bacterial problem. The disclosed bacteriophages have application in human health (personalized medicine, disinfectants, and diagnostics) such as for example, in MRSA and VRE, animal health (livestock medicine, diagnostics) such as for example, ear drop for treating dog ear infections of Staphylococcus intermedius, and food safety (produce cleansing, detection of bacterial contamination) such as for example, E. Coli, C. Jejuni, Salmonella, and Listeria.

[0078] According to one embodiment, the bacteriophages can not only be used for the treatment of antibiotic-resistant bacterial infections but also for prevention of bacterial-contamination in the environment and in food which may negatively affect human and animal health.

[0079] For example, the phages are useful for human health. Methicillin-resistant Staphylococcus aureus (MRSA) bacteria are an increasingly common hospital-acquired infection, often acquired through contact with contaminated surfaces. For facilities with a confirmed MRSA problem, this product can be used to thoroughly clean surfaces and reduce the development of new infections. According to an embodiment, there is provided a multi-strain MRSA-specific disinfectant cleanser that can be used on porous and non-porous surfaces in hospitals including beds, curtains, tables, chairs, diagnostic and monitoring equipment, and medical instruments.

[0080] According to an embodiment, the disclosed bacteriophages can be used to reduce or eliminate any bacteria and/or resistant bacteria that are pathogenic to humans and/or animals. In aspects, the advantages of using this disinfectant over the commonly-used disinfectants, such as bleach, are multiple. First, bacteriophage are more effective in destroying bacteria than conventional means. Second, phages can be left on surfaces to destroy new bacterial contamination events, surviving for roughly 24 hours. Third, unlike bleach, bacteriophages do not leave a corrosive residue, and thus do not harm instruments, fabrics, and skin. Fourth, bacteriophages, customized for harmful bacteria, are non-toxic, unlike cleaning solutions.

[0081] The phages are also useful in animal health treatments. For example, bacteriophage are tailored to address bacterial infections in chickens, replacing the antibiotic(s) commonly used, resulting antibiotic-free chickens—a commercial benefit in today's marketplace. This treatment also contributes to reducing the growing number of antibiotic-resistant infections that occur as bacteria mutate and evolve to be unaffected by antibiotics.

[0082] The phages are also useful in food safety. For example, bacteriophage-cleansing spray can be applied on agricultural crops for the prevention of food-borne illnesses from bacterial contamination during plant cultivation or during harvesting, such as Escherichia coli—contamination of strawberries.

[0083] The template technology is utilized to generate bacteriophages with various specific binding domains (thus selecting host range). The technology provides bacteriophages in high concentrations.

[0084] In some embodiments, bacteriophage-derived gene products may be useful for “lysis-from-without” whereby bacteria can be eliminated without having to become infected.

[0085] According to an embodiment there is provided a method of eliminating a bacterial contaminant without prior infection of the bacterial contaminant with a bacteriophage, the method comprising obtaining one or more lytic enzymes produced by the disclosed bacteriophage; applying the one or more lytic enzymes to a bacterial contaminant to eliminate the bacterial contaminant.

[0086] A bacteriophage or phage is defined as a virus that infects bacteria. Bacteriophages have a high specificity to their corresponding host bacteria. To infect bacteria, the bacteriophage attaches to specific receptors on the surface of the bacteria. This attachment determines the host range of each bacteriophage, and normally is restricted to some genera, species, or even subspecies of bacteria. This bacteriophage specificity could provide clinicians, laboratory technicians, technicians in the field, as well as consumers, with the ability to identify (detect or diagnose) specific types of bacteria by exploiting this bacteriophage characteristic.

[0087] Bacteriophages experience two types of natural life cycles, or methods of viral reproduction, known as the lytic cycle and the lysogenic cycle. In the lytic cycle, host cells will be broken and suffer death after replication of the virion. In contrast, the lysogenic cycle does not result in immediate lysing of the host cell and consequential host cell death; rather, the bacteriophage genome integrates with the host DNA, or establishes itself as a plasmid, and replicates along with the organism's genome. The endogenous bacteriophage remains dormant until the host is exposed to specific conditions (e.g., stress) at which point the bacteriophage may be activated, initiating the reproductive cycle resulting in the lysis of the host cell.

[0088] Endolysins are produced during the last stage of the phage lytic cycle from within their host and most are released into the periplasmic space (Borysowski et al., 2006). From there on, endolysins cleave covalent bonds in the peptidoglycan to release viral progeny (Fischetti, 2008). Within the endolysin subgroup, there are five classes: amidases, endopeptidases, muramidases, glucosaminidases and transglycosylases (Gasset, 2010).

[0089] According to an embodiment, there is provided the use of lytic enzymes or enzybiotics from bacterial viruses to combat antimicrobial resistance. An enzybiotic is defined to be a protein that degrades the bacterial cell wall, meaning that it is not subjected to bacteriophage proteins (Borysowski and Gorski, 2010). The term enzybiotics was first conceived in the paper ‘Prevention and elimination of upper respiratory colonization of mice by group A Streptococci by using bacteriophage lytic enzyme’ (Nelson et al., 2001). The bacteriophage lytic enzymes are specific. Phage derived lytic enzyme and their destructive activity against certain components of the cell wall found in pathogenic bacterial strains but not the natural microbiota of animals (Gasset. 2010). Two examples include group C Streptococcal lysin, effective in lysing group A Streptococci but has no effect on normal oral Streptococci (Fischetti, 2006). A more relevant example is attained from the use of the outer membrane protein FyuA, commonly expressed in pathogenic Gram-negative Escherichia coli. The fusion of FyuA binding domain to T4 lysozyme results in translocation of the fusion from the outer membrane to the periplasmic space where the lysozyme can destabilize the bacterial cell wall (Lukacik et al., 2013).

[0090] According to one embodiment, there is disclosed a method for providing an endolysin protein or plurality of endolysin proteins, which overcome the issues with whole bacteriophages. The one or more endolysins specifically targets and degrades the bacterial cell wall (peptidoglycan) from both within the cell or from outside of the cell resulting in lysis. In aspects, there is provided a method to generate various clones of endolysin genes from numerous bacteriophages and using high-throughput screening, and to evaluate the success of the endolysin clones against one or bacteria, such as for example, Escherichia coli strains, Salmonella typhimurium and Campylobacter jejuni.

[0091] Thus, the technology extends the number of bacterial strains that may be treated with bacteriophage or bacteriophage gene products with and without infection.

[0092] Bacteriophages multiply themselves by infecting and killing bacteria. During this process, bacterial cell wall components are released along with the bacteriophages. These components may be toxic to humans, animal and bacteria. Thus, large scale preparations of bacteriophages using bacteria require post-manufacturing treatments using harsh organic chemicals to reduce the toxicity to acceptable levels for clinical treatment.

[0093] Therefore, according to one embodiment, there is provided a method to grow the disclosed bacteriophages in large-scale use of bacteria by using yeast strains, such as for example, Kluyveromyces lactis and Pichia pastoris. The disclosed methods circumvent the liberation of toxic end products.

### Generating Mutant Bacteriophages

[0094] Environmental samples were isolated and fully characterized to determine candidates which meet certain criteria. Preferably, a suitable origin bacteriophage is selected from candidates which includes one or more of the following features:
[0095] lytic phages;
[0096] genetically different than known phages; and
[0097] carries only one attachment gene

[0098] According to an embodiment, there is provided a method to genetically modify one or more suitable origin bacteriophages.

[0099] In one embodiment, the origin bacteriophage includes one attachment gene. In another embodiment, the origin bacteriophage includes more than one attachment gene.

[0100] In one embodiment, the method generates bacteriophage platforms configured to allow for further interchanging of one or more desired proteins, such as for example, attachment proteins.

[0101] According to one embodiment, the bacteriophage genomes are manipulated to change the virus' life cycle, creating gain of function, loss of function or for virus identification (reporter genes). A summary is shown in FIG. 1.

[0102] In one aspect, the origin bacteriophage is a lytic phage. In one aspect, the origin bacteriophage is a lytic phage that carries one or more attachment gene. In another aspect, the origin bacteriophage is a lytic phage that carries only one attachment gene. In one aspect, the origin bacteriophage carries only one attachment gene.

[0103] According to one embodiment, there is provided a method to produce a mutant bacteriophage. In one aspect, the method comprises modifying the phage binding sites of an origin bacteriophage so that the mutant bacteriophage can attach to different serotypes. In one embodiment, the mutant phage is then rescued and the new binding domain is determined.

[0104] According to one embodiment, the engineered bacteriophage comprises only lytic genes, wherein any and all lysogenic genes have been removed to ensure integration cannot occur.

[0105] According to one embodiment, there is provided a method of ‘cell free cloning’ to provide a template (or platform) technology that allows for the modification/insertion/ deletion of viral genes. The platform was generated by constructing a mutant bacteriophage (defined as a phage which was generated from known and unknown genetic codes) using isolated environmental samples.

[0106] Genetic comparison of unknown phage types from environmental samples were tested against known phage types allowing us to isolate known gene types.

[0107] In one embodiment, there is provided a mutant bacteriophage where genes of interest were added and where unwanted genes were deleted. Together with noncoding regions, the mutant bacteriophage is a genetic platform that carries at least two unique open reading frames (ORF).

[0108] These unique ORFs can be used to add genes of interest. With reference to FIG. 2, the genomic compliment is divided into fragments with overlapping sections to adjacent fragments obtained by PCR amplification. Foreign genes are inserted within respective fragments. Fragments were combined using bacterial cellular extracts exploiting the homologous recombination methodology, where extracts contain the necessary components to link fragments together into one contiguous fragment via homology. Rescue of bacteriophages from the fully assembled genomes is achieved by cell-free translation. This method involves mixing DNA of choice along with toxin free cellular extracts from E. coli along with amino acids and energy, the transcription and translation proteins and enzymes from the extract drives expression from the DNA leading to generation of bacteriophage.

[0109] In aspects, the mutant bacteriophage is a genetic platform that carries four unique open reading frames (ORF).

[0110] In one embodiment, the first ORF can be used to insert an attachment gene for a bacteria. In one aspect, the attachment gene can be selected from, but not limited to, the following proteins:
[0111] DNA-binding phage protein of Enterobacteriaceae (>CP007523.1:3585236-3586111 Salmonella enterica subsp. enterica serovar Typhimurium str. CDC 2011K-0870, complete genome) SEQ ID No: 125
[0112] DNA-binding phage protein (>CP002910.1:3892390-3893265 Klebsiella pneumoniae KCTC 2242, complete genome) SEQ ID No: 126
[0113] DNA binding protein (>CM000724.1:300852-301217 Bacillus cereus BDRD-ST26 chromosome, whole genome shotgun sequence) SEQ ID No: 127
[0114] Phage DNA-binding transcriptional regulator (>CP003678.1:c575894-575136 Enterobacter cloacae subsp. dissolvens SDM, complete genome) SEQ ID No: 128
[0115] Phage ssDNA binding protein (>CP009983.1:941901-942146 Vibrio parahaemolyticus strain FORC_008 chromosome 2, complete sequence) SEQ ID No: 129
[0116] DNA binding protein (>CM000749.1:288493-288840 Bacillus thuringiensis. T04001 chromosome, whole genome shotgun sequence) SEQ ID No: 130
[0117] phage nucleotide-binding protein (>CP006620.1:c2486999-2486259 Enterococcus faecium Aus0085, complete genome) SEQ ID No: 131
[0118] DNA-binding protein Bacteriophage P4 (>AE005174.2:318190-318450 Escherichia coli 0157:H7 str. EDL933 genome) SEQ ID No: 132
[0119] CP4-6 prophage; putative DNA-binding transcriptional regulator (>HG738867.1:c269405-268512 Escherichia coli str. K-12 substr. MC4100 complete genome) SEQ ID No: 133
[0120] DNA-binding protein (Burkholderia pseudomallei K96243 chromosome 1, complete sequence) SEQ ID No: 134
[0121] Putative DNA-binding prophage protein (>AL590842.1:c1239408-1238512 Yersinia pestis C092 complete genome) SEQ ID No: 135
[0122] Putative DNA-binding prophage protein (>AL590842.1:1235071-1235391 Yersinia pestis C092 complete genome) SEQ ID No: 136
[0123] Putative phage-related DNA-binding protein (>BX950851.1:4152092-4152508 Erwinia carotovora subsp. atroseptica SCRI1043, complete genome) SEQ ID No: 137

[0124] In one embodiment, the second ORF is used to insert a gene encoding a protein useful for overcoming bacterial host defenses.

[0125] For example, the second ORF can be for introducing is to add enzymatic functions to combat bacterial defenses. In one aspect, the second ORF can be used to add endolysin genes, and/or biofilm degrading genes.

[0126] In an embodiment, the endolysin genes are selected from:
[0127] PP1 phage endolysin SEQ ID No: 138 which is similar to Escherichia phage B2: 93% identical and 100% query coverage Accession Number: MG581355; phage 31_1: 92% identical and 100% query coverage Accession Number: JX865427; Shigella phage EP23 : 91% identical and 100% query coverage Accession Number: JN984867; Sodalis phage 91% identical and 100% query coverage Accession Number : GQ502199.
[0128] PP2 phage endolysin SEQ ID No: 139 which is similar to Escherichia phage phiLLS: 99% identical and 100% query coverage Accession Number KY677846; Salmonella phage Stp1: 98% identical and 100% query coverage Accession Number: KY775453; Salmonella phage SPO1: 98% identical and 100% query coverage Accession Number: KY114934; T5 phage-like pork29: 97% identical and 100% query coverage Accession Number: MF431732.
[0129] PP3 phage endolysin SEQ ID No: 140 which is similar to Enterobacteria phage ATK48: 99% identical and 100% query coverage Accession Number KT184310; Shigella phage SHSML-52-1: 99% identical and 100% query coverage Accession Number: KX130865; Escherichia phage APCEc01: 99% identical and 100% query coverage Accession Number KR422352.1; E. coli 0157 typing phage 6: 98% identical and 100% query coverage Accession Number: KP869104; Shigella phage Shf125875: 98% identical and 100% query coverage Accession Number KM407600; Shigella phage phi25-307: 98% identical and 100% query coverage Accession Number: MG589383; Klebsiella phage vB_Kpn_F48: 73% identical and 98% query coverage Accession Number: MG746602;
[0130] PP7 phage endolysin SEQ ID No: 141 which is similar to Salmonella phage ST11: 95% identical and 100% query coverage Accession Number: MF370225; Salmonella phage Meda: 95% identical and 100% query coverage Accession Number: MH586731; Salmonella phage Si3: 95% identical and 100% query coverage Accession Number KY626162; Escherichia phage EC6: 95% identical and 100% query coverage Accession Number: JX560968; Bacteriophage Felix 01: 95% identical and 100% query coverage Accession Number

[0131] AF320576; Enterobacteria phage KhF2: 94% identical and 100% query coverage Accession Number: KT184314; Salmonella virus VSe102: 94% identical and 100% query coverage Accession Number MG251392; Salmonella phage Mushroom: 94% identical and 100% query coverage Accession Number: KP143762; Staphylococcus phage SA1: 94% identical and 100% query coverage Accession Number GU169904; E. coli 0157 typing phage 15: 94% identical and 100% query coverage Accession Number: KP869113; Citrobacter phage Mijalis: 83% identical and 99% query coverage Accession Number KY654690; Shigella phage Sf14: 82% identical and 99% query coverage Accession Number: MF327003;
[0132] PP11 phage endolysin SEQ ID No: 142 which is similar to Enterobacteria phage HK578: 79% identical and 97% query coverage Accession Number: K2086375; Escherichia phage Sloth: 78% identical and 97% query coverage Accession Number: KX534339; Escherichia phage Envy: 78% identical and 97% query coverage Accession Number: KX534335
[0133] Enterobacter cloacae A1S1 phage endolysin SEQ ID No: 143

[0134] In one embodiment, the biofilm degrading genes and glycocalyx degraders are selected from:

| Protein Name | Accession Number |
|---|---|
| Cathelicidin antimicrobial peptide | NM_004345.5 |
| LL-37 | |
| Histatin 3 (HTN3) | NM_000200.2 |
| Nisin | M24527.1 |
| Dispersin B | NZ_NRDE01000005.1 |
| Endo-1,4-β-glucanase (callulase) | NM_001247953.1 |
| Aureolysin | EF070234.1 |
| NucB | HQ112343.1 |
| Serine protease (SspA) | AF309515.1 |
| LapG protease | KT186446.1 |
| Melittin | NM_001011607.2 |
| Endo-1,4-β-mannosidase (manA) | AM920689.1 |
| α-amylase | A17930.1 |

[0135] For example, the second ORF can be for introducing antibacterial proteins used in template to address bacterial lysis. In one aspect, an example protein is a bacterial cell wall degrader used to degrade Staphylococcus aureus (>ENA|JQ066320|JQ066320.1 Staphylococcus aureus strain JP1 Psm betal (psm beta1) and Psm beta2 (psm beta2) genes, complete cds). SEQ ID No: 144

[0136] In other aspects, the second ORF can be for introducing enzymes which target the key linking chemistries (amide, ester and glycolytic bonds) found in bacterial cell walls. Examples include:
[0137] M20 family peptidase [uncultured bacterium], ACCESSION AHZ45606 (uncultured bacterium, >KF835382.1:c34024-32630 Uncultured bacterium clone SZR5 genomic sequence) SEQ ID No: 145
[0138] Lipolytic enzyme (uncultured bacterium ACCESSION AHZ45613 >KF835383.1:7038-8066 Uncultured bacterium clone WZR9 genomic sequence) SEQ ID No: 146
[0139] peptidase M56 ([uncultured bacterium] ACCESSION AHZ45657 Uncultured bacterium clone WZR18 genomic sequence (>KF835385.1:c14123-13038 Uncultured bacterium clone WZR18 genomic sequence) SEQ ID No: 147;
[0140] Another example is Uncultured bacterium clone HOAb112C long-chain fatty acid CoA-ligase gene ([uncultured bacterium] DBSOURCE accession KF955286.1) SEQ ID No: 148;
[0141] Bombyx mori BmGloverinl mRNA for gloverin-like protein 1, complete ACCESSION AB190863 SEQ ID No:; 149
[0142] Bombyx mori BmGloverin2 mRNA for gloverin-like protein 2, complete ACCESSION AB190864 SEQ ID No: 150;
[0143] Bombyx mori BmGloverin3 mRNA for gloverin-like protein 3 ACCESSION AB190865 SEQ ID No: 151; and
[0144] Bombyx mori BmGloverin3 mRNA for gloverin-like protein 4 ACCESSION AB190866 SEQ ID No: 152;

[0145] According to an embodiment, there is provided a method of producing a mutant bacteriophage, the method comprising inactivating at least one attachment gene from a selected bacteriophage, the selected bacteriophage can be isolated from bacteriophages from the environment. The method further comprises inserting, into the selected bacteriophage, one or more a heterologous nucleic acid sequences comprising one or more attachment genes. The one or more inserted attachment genes being different than the inactivated native attachment gene and is/are choosen because of its specificity for a selected bacteria, to produce the mutant bacteriophage. In some embodiments, the provision of the selected attachment gene(s) expands the range of possible host cells (i.e. bacteria) beyond the natural paired relationship.

[0146] According to an embodiment, there is provided a method of producing a mutant bacteriophage, the method comprising inactivating at least one attachment gene from a selected bacteriophage, the selected bacteriophage can be isolated from bacteriophages from the environment. The method further comprises inserting, into the selected bacteriophage, a first heterologous nucleic acid sequence comprising a first open reading frame encoding a first specific attachment gene. The first specific attachment gene is different than the inactivated attachment gene and is choosen because of its specificity for a selected bacteria, to produce the mutant bacteriophage.

[0147] In another embodiment, the method further comprises inserting a second heterologous nucleic acid sequence in a second open reading frame encoding a gene useful for overcoming bacterial defenses. In aspects, the gene for overcoming bacterial defenses may be a biofilm degrading gene, a glycocalyx degrading gene, a gene encoding an antibacterial protein, and a gene for an enzyme that disrupts the bacterial wall, to produce the mutant bacteriophage. In one aspect, the first open reading frame further encodes a second specific attachment gene that is different than the first specific attachment gene.

[0148] In some embodiments, the method inactivates all the attachment genes from the selected bacteriophage. In aspects, the step of inactivating comprises making an inactivating mutation in at least one native attachment gene. In some aspects, the inactivating mutation is a point mutation.

[0149] According to an embodiment, there is provided an anti-microbial composition for sanitizing or decontaminating a surface. In aspects, the anti-microbial composition comprises the disclosed mutant bacteriophage.

[0150] According to an embodiment, there is provided a method of decontaminating a surface suspected of containing a bacteria. In aspects, the bacteria is an infectious or a non-infectious bacteria. The method comprising applying the disclosed anti-microbial composition comprising the disclosed mutant bacteriophage to the surface. In aspects, the amount is effective to decontaminate the surface of at least substantially or all of the contaminating bacteria.

[0151] In aspects, the surface is a biological surface (animal or plant).

[0152] According to an embodiment, there is provided a method to generate specific mutant bacteriophage gene products. In aspects, there is provided a method of eliminating or substantially eliminating a microbial contaminant (an infectious or non-infectious bacteria), the method comprising: obtaining one or more lytic enzymes produced by the disclosed mutant bacteriophage and applying the one or more lytic enzymes to a bacterial contaminant. In some aspects, the elimination is accomplished without prior bacteriophage infection of the microbial contaminant and therefore leads to result of lysis from without.

[0153] All publications and patents mentioned in this specification are herein incorporated by reference to the same extent as if each individual publication or patent was specifically and individually indicated to be incorporated by reference.

[0154] The foregoing description and certain representative embodiments and details of the invention have been presented for purposes of illustration and description of the invention. It is not intended to be exhaustive or to limit the invention to the precise forms disclosed. It will be apparent to practitioners skilled in this art that modifications and variations may be made therein without departing from the scope of the invention.

### EXAMPLES

### Example 1—Bacteriophage Isolation

[0155] Samples from sewer and waste, environmental soils, and animal feces were collected and purified to be used for the isolation of bacteriophages. Purified samples were then screened for the presence of bacteriophages against specific bacteria. Protocols and methods for isolating bacteriophages from water samples were adapted from Bonilla et al. (2016) and Bourdin et al. (2014); solid and soil sample methods adapted from Sillankorva (2018), Pausz et al. (2009), and Van Twest & Kropinski (2009).

[0156] Solid samples were rehydrated using sterile water for a minimum of 1 hour to allow the bacteriophages to disseminate. Samples are then centrifuged to remove solid materials and large particulates and the supernatant is collected. The centrifuged environmental samples and water samples were then further processed and purified using filters (0.2 μM) to remove bacteria and smaller unwanted particulates. Filtered samples can be further concentrated using filter tubes or stored at 4° C. for future use.

[0157] Filtered samples were then tested against bacterial strains of interest using an agar overlay plaque assay technique (Kropinski et al. 2009). Liquid agar overlay was inoculated with filtered environmental sample and the bacterial strain of choice and mixed. It was then poured onto an agar culture plate (bacterial strain dependent) and allowed to harden. Plates were then incubated overnight (conditions are bacterial strain dependent) and observed the next day for plaques against the chosen strains. Plaques containing bacteriophages were then picked and further processed by 3-rounds of subsequent plaque assay overlays to purify the selected phage(s).

[0158] Using the method outlined above, numerous (hundreds) EV samples were collected and tested for suitability to develop the template. The function and structural genes were characterized for each EV sample, tested for integration (as detailed below). Candidate phages with a low copy number of lysogenic genes, and the structural and functional genes to allow for gram negative and gram-positive lysis was identified. A selected bacteriophage named PP8 was sequenced and gene structure and function were examined as detailed below. PP8 was selected as it had the desired genes. Although it also had lysogenic genes, these were removed using ORF replacement.

### Example 2—Platform Development

[0159] Using environmental sample EV31/PP8, after bacteriophage isolation we purified genomic material with PureLink viral DNA/RNA extraction kit. The full-length genome was amplified (EV31/Full/F/pYESIL and EV31/Full/R/pYESIL see sequence EV31) to have 30 bp homology with the pYESIL Sapphire vector. PCR amplification was performed using Phusion high-fidelity DNA polymerase (modification use of touchdown technique for primer annealing starting at 69 C and dropping by 0.5 C each cycle). PCR products were separated on agarose gels and bands were excised, extracted, and assembled. The resulting construct EV31pYES (unmodified) allowed for the genetic modification of EV31 and the determination of function of mutations in a phage rescue based system.

### Example 3—Full-Length Genome Assembly

[0160] In brief, the following provides for a method for the genetic manipulation of yeast (Kluyveromyces lactis and Pichia pastoris) cells to include T7 DNA (deoxyribonucleic acid)-dependent RNA (ribonucleic acid) polymerase transcription from Escherichia phage T7 followed by expression of bacteriophage in yeast. There is also provided a method for the genetic manipulation of yeast (Kluyveromyces lactis and Pichia pastoris) cells to include transcriptional components from bacteria (Escherichia coli) and RNA (ribonucleic acid) polymerase (P) inside of yeast followed by expression of the bacteriophage in yeast.

[0161] With reference to FIG. 3, the genomic compliment was divided into fragments with overlapping sections to adjacent fragments obtained by PCR amplification. Foreign genes were inserted within respective fragments. Fragments were combined via homologous recombination into full-length genomes and a yeast-based plasmid (as an additional PCR fragment) with a T7 promoter inside of yeast strain Pichia pastoris. The stable plasmid under T7 promoter control drove the rescue of bacteriophages upon induction of the P. pastoris which contains T7 RNA polymerase cells are then lysed using enzymatic and mechanical means to release fully-formed bacteriophage particles.

[0162] Homologous recombination of EV31pYes (unmodified) with pYESIL vector was achieved using 100 ng of each PCR product and transformed into chemically-competent yeast cells. pYESIL vector (100 ng) and EV31 (100 ng) were combined. Competent yeast cells were added and mixed gently followed by the addition of 600 μl of polyethylene glycol (PEG) and lithium acetate (LiAc) solution then mixed gently. The mixture was incubated at 30 C for 30 minutes, inverting in 10 minutes intervals. Immediately after incubation, 35.5 μl of dimethyl sulfoxide (DMSO) was added, mixed by inversion and subjected to heat-shock for 20 min at 42 C (with occasional inversion). Tubes were then centrifuged at 200-400 xg for 5 minutes, supernatant was discarded and the cell pellet was resuspended in 1 ml sterile 0.9% sodium chloride (NaCl). Visualization of transformation was achieved by spread-plating 100μl onto selective agar plates (media without tryptophan) and a 3-day incubation period at 30 C. Colony-PCR screening can determine the presence of positive transformants. Homologous recombination was achieved by standard cloning techniques to make S. cerevisae strain 5150, chemically-competent. Briefly, using the Gietz and Schiestl 2007 protocol, a spread plate of a single yeast colony from stock was created and incubated overnight at 30 C. The next day, 50 μl equivalent of cells was scraped and washed in a tube with 1 ml of sterile nuclease-free water followed by a 13,000 xg spin for 0.5 minutes. The following was added to the cell pellet in order: 240 μl of PEG-3350 (50% w/v), 36 μl LiAc (1M), 50 μl single—stranded carrier DNA (2 mg/m1 of pig sperm) and 34 μl plasmid-nuclease free water mixture (<lug plasmid). It was gently vortexed to mix, incubated at 42 C for 20-180 minutes (timing is dependent on strain). For EV31, 45 minutes was used. After transformation, it was spun for 13,000 xg for 0.5 minutes, then the supernatant was removed and the pellet was resuspended in 1 ml sterile nuclease-free water. The mixture was spread onto selective media plates, yeast synthetic drop out media without uracil and incubated at 30 C for 3-4 days. Verification of clone was carried out using Colony-PCR screening.

[0163] FIG. 4 shows the titration of PP8 after rescue from the genetic template.

[0164] A graphical representation which depicts the location of the genes of the EV31/PP8 is shown in FIG. 5 and a detailed nucleotide sequence of the entire genome of showing sense strand (SEQ ID NO: 1), the antisense strand of the complementary sequence (SEQ ID NO:2), and the sequence of the proteins encoded therein (SEQ IDs NO: 3-124) along with the restriction endonuclease sites is provided in FIG. 6. FIG. 7 shows a detailed description of the EV31/PP8 molecule and proteins with annotations.

### Example 4—Clone Verification by Colony PCR

[0165] Screening for positive-transformants (plate growth colonies) was carried out as follows. Individual yeast colonies were placed in into 15 μl of lysis buffer for inoculation. In a separate tube, 5 μl of each mixture was transferred and stored at 4 C, until ready for large scale grow up of positive colonies. The remaining 10 μl of cell suspension was boiled for 5 minutes at 95 C, then immediately placed on ice, adding 40 μl of nuclease-free water and mix. 0.5 μl of lysate was added to each PCR reaction in a total volume of 50 μl and visualized by agarose gel electrophoresis. The resulting gel of the PP8 DNA digestion is shown in FIG. 8.

### Example 5—Development of Unique ORF's

[0166] Using the PP8 template, a mutant bacteriophage was generated. Native attachment proteins were removed by generating point mutations using homologous recombination.

Gene Disruption 14452-13316 (tail protein):
>PP8-F1F
SEQ ID No: 185
ACAAATAGTGAAGAGATAAACCAGGTTGAGCAAG
>PP8-tail-mut-R
SEQ ID No: 186
TTGACGTTGAATCTGGAGTCGATAGGTGCGACAGGTTACCAATGG
>PP8-tail-mut-F
SEQ ID No: 187
GTCGCACCTATCGACTCCAGATTCAACGTCAAGGTCTCACC
>PP8-F1R
SEQ ID No: 188
TTCCAAGACGGATTCGAACCGTCACTAGTACAAGG
Gene Disruption 14823-14446 (tail protein):
>PP8-F1F
SEQ ID No: 185
ACAAATAGTGAAGAGATAAACCAGGTTGAGCAAG
>PP8-hyp1-mut-R
SEQ ID No: 189
TTAATGATGTTATCTCGATAACGTCGACATGGAGACTCAGTAAATGG
>PP8-hyp1-mut-F
SEQ ID No: 190
TCTCCATGTCGACGTTATCGAGATAACATCATTAAGGTTGTACC
>PP8-F1R
SEQ ID No: 188
TTCCAAGACGGATTCGAACCGTCACTAGTACAAGG
Gene Disruption 16522-17937 (tail protein):
>PP8-F1F
SEQ ID No: 185
ACAAATAGTGAAGAGATAAACCAGGTTGAGCAAG
>PP8-hyp2-mut-R
SEQ ID No: 191
TTGAATAAACCGTTATCGCCTTCTTAAAGCAACCTGTATTGCGTTCTGC
>PP8-hyp2-mut-F
SEQ ID No: 192
TTGCTTTAAGAAGGCGATAACGGTTTATTCAACAAACCCTCATTTCATTG
>PP8-F1R
SEQ ID No: 188
TTCCAAGACGGATTCGAACCGTCACTAGTACAAGG
Gene Disruption 34777-37020 (tail protein):
>PP8-F3F
SEQ ID NO: 158
TTCTTAAGGAGGGTTATGAATGTGTTATACAGG
>PP8-tape-mut-R
SEQ ID No: 193
TCTGTGTAGTTCGGCCAACTGTAGTGTGCGAATGATGCAGCGAACATTC
>PP8-tape-mut-F
SEQ ID No: 194
TTCGCACACTACAGTTGGCCGAACTACACAGATACCATGAAGCAGTACTC
>PP8-F3R
SEQ ID NO: 167
GTGGTAAGGTAAGGTATGGAAGGATGGCAGTAG

[0167] The mutant bacteriophage can comprises four ORFs: ORF1 is located at position 46090; ORF2 is located at position 73195; ORF3 is located at position 19991; ORF4 is located at position 60431.

[0168] Using modification primers EV31/0RF1/F and EV31/ORF1/R for ORF1 (between nucleotide positions 46,090 and 46,091) and EV31/ORF2/F and ORF2/R for ORF2 (between nucleotide positions 73,195 and 73,196) and cell free cloning we generated three EV31 mutant constructs. EV31 (ORF1), EV31 (ORF2), and EV31 (ORF1/2). In the construction of ORF2 we first removed the natural binding domain from EV31 and added a multiple restriction enzyme cassette. This cassette is then used to add new bacterial binding domains.

[0169] Both homologues recombination and insertion using restriction digests. For restriction digest, the enzyme TspRI allows insertion of a multiple cloning site (MCS). In one example, ORF3 is located at 19991 in ev31/pp8 sequence. In this example, the insertion of the MCS would be done by using TspRI. Once the MCS is inserted, the insertion an attachment gene of choice can done achieved by using restriction enzymes sites found in the MCS. Example of MCS for ORF3: GCCGGCAGTGGATCCCCGGGGAAGATATTC SEQ ID NO: 153. This MCS carries enzymes sites for Nael, TspRI, Xmnl, Smal. The primers used for adding the MCS to site 19991 are: EV31 ORF3 primer f GCTACACTGCTGAGA SEQ ID NO: 154; EV31 ORF3 primer r TCTCAGCAGTGTAGC SEQ ID NO: 155.

[0170] The fourth ORF is located at 60431 in ev31/pp. In this example, the insertion of the MCS would be done by using TspRI. Once the MCS is inserted, the insertion an attachment gene of choice can done achieved by using restriction enzymes sites found in the MCS. The primers used for adding the MCS to site 60431 are: EV31 ORF4 primer f CATCAGATGCTGG SEQ ID NO: 156; EV31 ORF4 primer r CCAGCATCTGATG SEQ ID NO: 157.

### Example 6—Integration

[0171] An analysis of the genome of the EV31/PP8 revealed a possible lysogenic gene located at 60351-62336. Mutation of the gene by generating an ORF at the site of 60431 (ORF4). Once the lysogenic gene were inactivated, we carried out integration studies to ensure integration did not occur. The results are shown in FIGS. 9a and 9b.

[0172] Under conditions that promote integration we confirmed that PP8 lacks the ability to integrate. The gel electrophoresis photograph identifies integration events demonstrated by a bacteriophage (bacteriophage induction control), determined by polymerase chain reaction (PCR) on whole bacterial cells. A respective primer set for each bacteriophage would give a positive PCR signal (right panel; lane 5) if the bacteriophage genetic material was integrated inside of the purified (bacteriophage particle-free) bacterial colonies. Contrarily, PP8 cannot integrate into the bacterial host cells, as indicated by the absence of a positive signal for the PP8 sequence in the photograph (left panel; lanes 5-7).

### Creating Conditions for Integration

[0173] Fresh overnight cultures of the bacterial host (Escherichia coli C) from glycerol stocks were prepared in Luria-Bertani (LB) broth. Once saturated, the cultures were diluted (1:100) in fresh LB broth, supplemented with 2 mM CaCl₂ and incubated until an OD₆₀₀ of 0.6. Mixtures of host (100 μL of E. coli C) and bacteriophage (100 μL at multiplicity of infection of 5) in 3 mL of molten, soft agar were overlaid onto previously, dried LB-agar plates. Following an overnight incubation, three colonies from each plate were picked, re-streaked onto fresh LB-agar plates and incubated overnight for three rounds. The purified colonies (free of contaminating bacteriophage particles) were inoculated into LB—2 mM CaCl₂ broth and incubated overnight.

### Analyzing Potential Integration Events

[0174] Polymerase chain reaction (PCR) master mixes of GoTaq® DNA polymerase (Promega) were set up following the manufacture's recommendations along with the respective primers for each bacteriophage to be evaluated. Five μL from each overnight culture were spiked into their respective PCR reaction. Cycling conditions were altered to include whole-bacterial cell boiling in the initial denaturation period (95° C. for 10 minutes) and an annealing temperature of 59° C. Five μL of completed PCR reactions were subjected 1% agarose gel electrophoresis, stained and visualized under ultraviolet (UV) light. The results are shown in FIGS. 9a and 9b.

### Example 7—ORF1 Insertion SP5 Attachment Protein (Between 46,090 and 46,091)

[0175] Using PP8 we developed of a MRSA specific PP8 binding phage by utilizing the PP8 template we removed native attachment genes and added attachment protein SP5 at the ORF1 location (between 46,090 and 46,091) using homologous recombination. The primer sets used for this homologous recombination are:

[0176] 1. Primer set for PP8 Fragment (bold) and homologous recombination with SP5 gene (underline) on 5′

>PP8-F3F
SEQ ID NO: 158
TAATACTCTACAGACACCACTAACTGATGCTGCTG
>PP8-SP5-R
SEQ ID NO: 159
CTCGTTTCAACATCTTTTATTTTGTACATACAAGGGATTAAGCAG
TTCTTACCC

[0177] 2. Amplification of SP5 (underline):

>SP5-F
SEQ ID NO: 161
ATGTACAAAATAAAAGATGTTGAAACGAG
>SP5-R
SEQ ID NO: 162
CACCCCTTAATTAAATAAAGTGTATTAGGGTC

[0178] 3. Primer set for PP8 Fragment (bold) and homologous recombination with SP5 gene (underline) on 3′

>PP8-SP5-F
SEQ ID NO: 163
CACTTTATTTAATTAAGGGGTGATGACTGATTGTTAAGATGGTG
TTAATATTC
>PP8-F3R
SEQ ID NO: 167
GTGGTAAGGTAAGGTATGGAAGGATGGCAGTAG

[0179] The sequence of the insertion (MRSA attachment protein SR5) is shown in SEQ ID NO: 168.

### Example 8—Phage Efficacy against MRSA

[0180] We tested our new PP8(SP5) phage against MRSA infected patient samples 1 through 6. These are MRSA positive patient samples from clinical isolation. An overview of the method is shown in FIG. 10 and the results are shown in FIGS. 11 and 12. Patient samples 1, 2, 4, 5, 6 were all lysed using PP8 (SR5). Patient sample 3 showed only a partial binding profile, which suggested that the binding may not have been specific enough to give a 100% lysis rate. Positive control was PP8 bacteriophage with in SA attachment site.

[0181] After sequence analysis of patient sample 3, through sequence analysis and blast searching for attachment sites, a new binding site was revealed.

### Example 9—ORF1 Insertion SP6 Attachment Protein (between 46,090 and 46,091)

[0182] We also generated a PP8 SR6 mutant and tested this against Staphylococcus aureus. The result is shown in FIG. 13.

[0183] We then generated a new PP8 strain to attach to and lyse patient sample 3. We further generated a generate PP8 (SR5, SR6) mutant using homologous recombination by adding attachment protein SP6 to ORF1 of the original PP8 template to generate PP8 (SR5, SR6). The primer sets used for this homologous recombination are:

[0184] 1. Primer set for PP8 Fragment (bold) and homologous recombination with SP6 gene (underline) on 5′

>PP8-F3F
SEQ ID NO: 158
TAATACTCTACAGACACCACTAACTGATGCTGCTG
>PP8-SP6-R
SEQ ID NO: 160
CTCGTTTCAACATCTTTTATTTTGTACATACAAGGGATTAAGCAGTT
CTTACCC

[0185] 2. Amplification of SP6 (underline):

>SP6-F
SEQ ID NO: 164
ATGTACAAAATAAAAGATGTTGAAACGAG
>SP6-R
SEQ ID NO: 165
TCACCCCTTAATTAAGTAAAGTGTATTAGGGTC

[0186] 3. Primer set for PP8 Fragment (blue) and homologous recombination with SP6 gene (underline) on 3′

>PP8-SP6-F
SEQ ID NO: 166
AGACCCTAATACACTTTACTTAATTAAGGGGTGATGACTGATTGT
TAAGATGGTG
>PP8-F3R
SEQ ID NO: 167
GTGGTAAGGTAAGGTATGGAAGGATGGCAGTAG

[0187] The sequence of the insertion (MRSA attachment protein SP6) is shown in SEQ ID NO: 169.

[0188] The resultant new strain of bacteriophage was called PP8(SP5, SP6). We used this new bacteriophage in conjunction with PP8(SP5) to determine if we could lyse patient samples 1 through 6 using these two new modified bacteriophages. As see in FIGS. 14 and 15, the new mutant bacteriophage lysed all six patient samples demonstrating that addition of a new attachment gene to our PP8 template allows for the specific targeting of a bacterium.

### Example 10—ORF2 endolysis gene insertion (inserted at 73195 in PP8)

[0189] 1. Primer set for PP8 Fragment (bold) and homologous recombination with foreign gene (underline) on 5′

>PP8-F5F
SEQ ID NO: 170
AAGACTCGGAAGAAGGTAGTCACTAAGGAAAGTG
>PP8-endolysin-R
SEQ ID NO: 171
CCGTAAATCTTAGACCGTTGTCACTGAATCGCATGTCAAGTTTTAC
ATAGAAATCC
>endolysin-F
SEQ ID NO: 172
ATGCGATTCAGTGACAACGGTCTAAGATTTACGGCAGC
>endolysin-R
SEQ ID NO: 173
TTATGCTGCGTTACGCCCGATTTTCTCGGCAACGTCC
>PP8-endolysin-F
SEQ ID NO: 174
TTGCCGAGAAAATCGGGCGTAACGCAGCATAAAAGGTGATGTGGGT
CTTGATAGG
>PP8-F5R
SEQ ID NO: 175
GCAACACTGTATCGGCTACTTCAAAGTCTTCTCTG

[0190] The insertion of the endolysis gene was carried out using normal molecular biology techniques. The sequence of the insertion is shown in SEQ ID NO: 176.

### Example 11—Insertion of Attachment Proteins in ORF1 and ORF2 Homologous Recombination in ORF1

[0191] 1. Primer set for PP8 Fragment (bold) and homologous recombination with foreign gene (underline) on 5′

>PP8-F3F
SEQ ID NO: 158
TAATACTCTACAGACACCACTAACTGATGCTGCTG
>PP8-attachment_protein-R
SEQ ID NO: 177
CATATCCTGCGCCAGTCGCGACATACAAGGGATTAAGCAGTTCTTA
CCCAAGC

[0192] 2. Amplification of foreign gene (underline):

>attachment_protein-F
SEQ ID NO: 178
ATGTCGCGACTGGCGCAGGATATGAAAAAACTGG
>attachment_protein-R
SEQ ID NO: 179
TCAATCAGTATACCCGTATACCTGCTC

[0193] 3. Primer set for PP8 Fragment (bold) and homologous recombination with foreign gene (underline) on 3′

>PP8-attachment_protein-F
SEQ ID NO: 180
TTGAGCAGGTATACGGGTATACTGATTGATGACTGATTGTTAAGATGGTG
>PP8-F3R
SEQ ID NO: 167
GTGGTAAGGTAAGGTATGGAAGGATGGCAGTAG

### Homologous Recombination in ORF2

[0194] 1. Primer set for PP8 Fragment (bold) and homologous recombination with foreign gene (underline) on 5′

>PP8-F5F
SEQ ID NO: 170
AAGACTCGGAAGAAGGTAGTCACTAAGGAAAGTG
>PP8-attachment_protein-R
SEQ ID NO: 181
CATATCCTGCGCCAGTCGCGACATGTCAAGTTTTACATAGAAATCCTGTCA

[0195] 2. Amplification of foreign gene (underline):

>attachment_protein-F
SEQ ID NO: 182
ATGTCGCGACTGGCGCAGGATATGAAAAAACTGG
>attachment_protein-R
SEQ ID NO: 183
TCAATCAGTATACCCGTATACCTGCTC

[0196] 3. Primer set for PP8 Fragment (bold) and homologous recombination with foreign gene (underline) on 3′

>PP8-attachment_protein-F
SEQ ID NO: 184
TTGAGCAGGTATACGGGTATACTGATTGAAAGGTGATGTGGGT
CTTGATAGG
>PP8-F5R
SEQ ID NO: 175
GCAACACTGTATCGGCTACTTCAAAGTCTTCTCTG

### Example 12—Bacteriophage Development to Target Escherichia coli, Salmonella enterica and Clostridium perfringens species

[0197] A sequence analysis of all pathogenic Escherichia coli, Salmonella enterica and Clostridium perfringens species currently causing mortality in Canadian poultry farms allowed evaluation and generation of a universal binding domain, which was used to genetically design phages to destroy these pathogenic bacteria. The process to achieve this was as follows:

[0198] 1) Sequence analysis:

[0199] Samples of feces and other excrement were collected from Manitoba poultry farms for the identification of E. coli, and Salmonella enteric, Clostridium perfringens samples were supplied by an industry partner. All of these samples were used to isolate pathogenic bacteria as well as bacteriophage (to be used to build upon our bacteriophage library) present in the Canadian poultry population. Once pure cultures of pathogenic bacteria were attained, sequence analysis of the bacterium was carried out using an Illumine Miseq 2000. After analysis of these sequences, a ubiquitous attachment region for each bacterium was obtained. Using a Clone Manager genetic program, conserved attachment regions on the surface of various bacterial species were determined, and the generation of a genetic clone which can attach to the conserved bacterial binding domain was reverse engineered, as described below.

[0200] 2) Insertion of conserved attachment region into template and propagation in yeast strain (CP109):

[0201] This ubiquitous attachment construct was sub-cloned into the disclosed bacteriophage template. Infectious bacteriophages were generated by transforming and propagating in yeast strain CP 109, which has the capability of holding multiple copies of the bacteriophage template. This was achieved using two methodologies:

[0202] a) in vivo by transformation and eventual induction of the bacteriophage template in yeast cells, or

[0203] b) in vitro by using cellular extracts of the yeast cells.

[0204] Regardless of the method used, the advantage of propagating using these methods lies in the avoidance of classical bacteriophage propagation in which potentially dangerous levels of bacterial endotoxins contaminate the preparations. These methods of phage production remove this hurdle, as yeast cells are used to grow the bacteriophage.

[0205] 3) Determination of phage ability to target and infect multiple E.coli, Salmonella enterica and Clostridium perfringens pathogenic bacterial species:

[0206] Growth characteristics were carried out on the bacteriophage to ensure that the ubiquitous attachment protein was properly inserted. E.coli spp., Salmonella enterica and Clostridium perfringens were infected and phage growth analyzed, as described below. Lytic testing was carried out to ensure no integration took place. Cellular toxicity testing was carried out to validate the non-toxic extraction methods in yeast. The phages have been analyzed for binding ability and are ready for evaluation of phage treatment in broiler chickens.

### Example 13—Generation of Mutant PP8 Phages to Target Escherichia coli, Salmonella enterica and Clostridium perfringens species

[0207] The method for generating mutant phages that include Escherichia coli, Salmonella enterica and Clostridium perfringens specific binding domains and specific endolysins were generated using the PP8 phage template is shown in FIGS. 16 and 17.

[0208] Specific tail fiber genes belonging to Escherichia coli, Salmonella enterica and Clostridium perfringens and specific endolysin genes were prepared for insertion into the PP8 bacteriophage template. Results of the agarose gel is shown in FIG. 18 where:
[0209] Lane one: genetic ladder
[0210] Lane two: Tail fiber for E. coli bacteria binding (3398 KB)
[0211] Lane three: Tail fiber for Clostridium (1200 KB)
[0212] Lane four: Tail fiber for Salmonella (497 KB)
[0213] Lane five: Endolysin gene (476 KB)
[0214] Lane six: Endolysin gene (680 KB)
[0215] Lane seven: Endolysin gene (590 KB)
[0216] Lane eight: genetic ladder

[0217] Bands of interest were gel extracted and cloned into the PP8 bacteriophage template to generating three different mutant bacteriophages which can bind to and lyse E.coli spp., Salmonella spp. and Clostridium spp.

[0218] The insertion of the genes into PP8 bacteriophage template produced the engineered mutants are as follows:

### Mutagenic Phage Title: PP8—E. coli Lambda ORFs—SEQ ID No. 195

[0219] Source: Enterobacteria phage Lambda; 48.5 kb linear DNA genome; Genbank #: J02459.1

[0220] Genes obtained:

[0221] ORF1: R (cell lysis; 158) located in PP8 genome at position 76594-77070 (aka Lambda R gene)

[0222] ORF2: J (tail:host specificity; 1132) located in PP8 genome at position 46090-49488 (aka Lambda gpJ)

### Mutagenic Phage Title: PP8—S. typhimurium P22 ORFs—SEQ ID No. 196

[0223] Source: Salmonella phage P22; 44.7 kb linear DNA genome; Genbank #: KR296686.1

Genes obtained:

[0224] ORF1: SP22_63 (amidase) located in PP8 genome at position 73693-74283 (aka P22 lysin)

[0225] ORF2: SP22_57 (tail fibre) located in PP8 genome at position 46090-46587 (aka P22 tail spike)

### Mutagenic Phage Title: PP8-C. perfringens CPS2 ORFs—SEQ ID No. 197

[0226] Source: Clostridium phage CPS2; 18.0 kb linear DNA genome; Genbank #: MH248069.1

Genes obtained:

[0227] ORF1: CPS2_16 (amidase) located in PP8 genome at position 74395-75075 (aka CPS2 amidase)

[0228] ORF2: CPS2_9 (tail protein) located in PP8 genome at position 46090-47289 (aka CPS2 tail fibre)

### Mutagenic Phage Title: PP8 Gene Insertions—SEQ ID No. 198

[0229] To demonstate that any tail fibre could be inserted and quickly visually verify virus replication (instead of awaiting plaque formation) we generated a PP8 phage with two different genes (a T7 phage-tail fibre and a green fluorescent protein (GFP) reporter gene) inserted in each open reading frame (ORF).

[0230] Source: Expression vector GFPuv-reporter; 3.1 kb circular DNA plasmid; Genbank #: KX980038.1

Gene obtained:

[0231] ORF1: Green fluorescent protein (GFP) located in PP8 genome at position 74857-75573 (aka inserted GFP)

[0232] Source: Enterobacteria phage T7; 39.9 kb linear DNA genome; Genbank #: AY264774.1

Gene obtained:

[0233] ORF2: Gene 17 located in PP8 genome at position 46090-47751 (aka inserted tail fibre)

[0234] To confirm the insertion, the mutant PP8 bacteriophages were digested and the results of the agarose gel is shown in FIG. 19 where:
[0235] Lane one: Rescued GFP PP8 construct
[0236] Lane two: Rescued PP8 with E.coli tail fiber inserted.
[0237] Lane three: blank
[0238] Lane four: Rescued PP8 with Clostridium tail fiber inserted.
[0239] Lane five: Rescued PP8 with Salmonella tail fiber inserted

[0240] FIG. 20 shows the titer a PP2/PP8 genetic template with E.coli tail fiber insertion on an E. coli lawn. As seen from FIG. 20, the addition of a specific 078 E.coli tail fiber binding domain generated a bacteriophage, using the PP8 genetic template, that binds to and removes 078 E.coli.

[0241] FIG. 21 shows the titer of a PP8 genetic template with Salmonella typhimurium strain A3 tail fiber insertion. Rescued bacteriophage were dot blotted on a lawn of Salmonella typhimurium. As seen from FIG. 21, the addition of a specific Salmonella typhimurium tail fiber binding domain generated a bacteriophage, using the PP8 genetic template, that binds to and removes Salmonella typhimurium.

[0242] FIG. 22 shows the titer of a PP8 genetic template with Clostridium perfringens CPS2 tail fiber insertion. Rescued bacteriophage were dot blotted on a lawn of Clostridium perfringens CPS2. As seen in the FIG. 22, the addition of a specific Clostridium perfringens CPS2 tail fiber binding domain generated a bacteriophage, using the PP8 genetic template, that binds to and removes Clostridium perfringens CPS2.

### REFERENCES

[0243] Bonilla, N., Rojas M. I., Netto Flores Cruz, G., Hung, S. H., Rohwer, F., Barr, J. J. 2016. Phage on tap-a quick and efficient protocol for the preparation of bacteriophage laboratory stocks. Peer)., 4, e2261.

[0244] Bourdin, G., Schmitt, B., Marvin Guy, L., Germond, J. E., Zuber, S., Michot, L., Reuteler, G., Brüssow, H. 2014. Amplification and purification of T4-like Escherichia coli phages for phage therapy: from laboratory to pilot scale. Appl Environ Microbiol. 80, 1469-1476.

[0245] Kropinski, A. M., Mazzocco, A., Waddell, T. E., Lingohr, E., Johnson, R .P. 2009. Enumeration of bacteriophages by double agar overlay plaque assay. Methods Mol Biol. 501, 69-76.

[0246] Pausz, C., Clasen, J. L., Suttle, C. A. 2009. Isolation independent methods of characterizing phage communities 1: strain typing using fingerprinting methods. Methods Mol Biol. 502, 255-278.

[0247] Sillankorva, S. 2018. Isolation of Bacteriophages for Clinically Relevant Bacteria. Methods Mol Biol. 1693, 23-30.

[0248] Van Twest, R., Kropinski, A.M. 2009. Bacteriophage enrichment from water and soil. Methods Mol Biol. 501, 15-21.

[0249] Gasset, M. (2010). Bacteriophage Holins and their Membrane Disrupting Ability, 123-148. https://doi.org/10.1002/9780470570548.ch6

[0250] Fischetti, V. A. (2008). Bacteriophage lysins as effective antibacterials. Current Opinion in Microbiology, 11(5), 393-400. https://doi.org/10.1016/j.mib.2008.09.012

[0251] Borysowski, J., Weber-Dabrowska, B., & Gorski, A. (2006) Bacteriophage Endolysins as a Novel Class of Antibacterial Agents. Experimental Biology and Medicine, 366-377. http://journals.sagepub.com/doi/10.1177/153537020623100402

1. A method of engineering bacteriophages comprising:
isolating a bacteriophage;
removing all attachment genes from a genome of said bacteriophage;
inserting a first unique open reading frame encoding one or more attachment genes and inserting a second unique open reading frame encoding one or more genes useful for overcoming bacterial defenses;
inserting a non-natural attachment gene into said first open reading frame, wherein said non-natural attachment gene is specific for attaching to a selected bacteria.

2. The method of claim 1 wherein one or more genes useful for overcoming bacterial defenses are endolysins, bio-film reducers, glycocalyx penetrators, or any combination thereof.

3. (canceled)

4. (canceled)

5. The method of claim 1 wherein said removing and said inserting utilizes cell free cloning of said bacteriophages.

6. The method of claim 1 further comprising screening for lysogenic genes, and inactivating said lysogenic genes.

7. The method of claim 1, wherein the selected bacteriophage is a bacteriophage with a low copy number of lysogenic genes.

8. (canceled)

9. The method of claim 1, further comprising inserting a second heterologous nucleic acid sequence comprising a second open reading frame encoding a gene useful for overcoming bacterial defenses.

10. The method of claim 9 wherein the gene useful for overcoming bacterial defenses comprises one or more of a biofilm degrading gene, a glycocalyx degrading gene, a gene encoding an antibacterial protein, or a gene for an enzyme that disrupts the bacterial wall, to produce the mutant bacteriophage.

11. The method of claim 10 wherein the gene for an enzyme that disrupts the bacterial wall is an endolysin.

12. The method of claim 11 wherein the endolysin comprises the nucleotide sequences of SEQ ID No: 138; SEQ ID No: 139; SEQ ID No: 140; SEQ ID No: 141; SEQ ID No: 142; or SEQ ID No: 143; or a fragment thereof.

13. The method of claim 10 wherein the gene for an enzyme that disrupts the bacterial wall comprises the nucleotide sequence of SEQ ID No: 144, or a fragment thereof.

14. The method of claim 10 wherein the biofilm degrading gene and glycocalyx degrading gene comprise one or more of Cathelicidin antimicrobial peptide LL-37; Histatin 3 (HTN3); Nisin; Dispersin B; Endo-1,4-β-glucanase (callulase); Aureolysin; NucB; Serine protease (SspA); LapG protease; Melittin; Endo-1,4β-mannosidase (manA); or α-amylase, or a fragment thereof.

15. The method of claim 10 wherein the gene for an enzyme that disrupts the bacterial wall is a gene that targets linking chemistries in the bacterial cell wall.

16. The method of claim 15 wherein the gene that targets linking chemistries in the bacterial cell wall comprises nucleotide sequences of one or more of SEQ ID No: 145; SEQ ID No: 146; SEQ ID No: 147; SEQ ID No: 149; SEQ ID No: 150; SEQ ID No:
151; SEQ ID No 152; or a fragment thereof.

17. The method of claim 1, wherein the non-natural attachment gene is attachment gene SP5, attachment gene SP6, or fragment thereof.

18. The method of claim 2 wherein the non-natural attachment gene comprises the nucleotide sequences of SEQ ID No: 125; SEQ ID No: 126; SEQ ID No: 127; SEQ ID No: 128; SEQ ID No: 129; SEQ ID No: 130; SEQ ID No: 131; SEQ ID No: 132; SEQ ID No: 133; SEQ ID No: 134; SEQ ID No: 135; SEQ ID No: 136; or SEQ ID No: 137; or fragment thereof.

19. (canceled)

20. (canceled)

21. The method of claim 1, wherein the bacteriophage binds to E. coli Lambda and the first attachment gene is Lambda gpJ gene.

22. The method of claim 1, wherein the bacteriophage binds to S. typhimurium, and the first attachment gene is P22 tail spike gene.,

23. The method of claim 1, wherein the bacteriophage binds to C. perfringens and the first attachment gene is CPS2 tail fibre.

24. The method of claim 21 wherein the gene useful for overcoming bacterial defenses is Lambda R gene.

25. The method of claim 22 wherein the gene useful for overcoming bacterial defenses is P22 lysin.

26. The method of claim 23 wherein the gene useful for overcoming bacterial defenses is CPS2 amidase.

27-31. (canceled)

The application's sequence listing, which the Patent Office published only in electronic form, follows.

SEQUENCE LISTING (198 sequences)

SEQ ID NO: 1 - DNA, 87662 bp, Artificial Sequence
  found in bacteriophage isolated from environment
acaaatagtgaagagataaaccaggttgagcaagaaaaatctttttattgtagtgcatatagatttattaagagggctagaacacatacgaagatagccttatcatcaatttatctaagaattataccaaaatttttagcaaaaagcaagaaaaataaaagcctgatctgctgagatcaggcttggttgattaatcctctggattaacatccaggaaatttttaatagcatcgtgcatagtttctttacgaagctgacgtccaatcaaaatatgaataggttcgactcgaccattaggtacttgatttgtgttctgttttgtggtagtcgtgtgcgcccgtttcattacagttttgccaaaaatatttttaaaattttttcttgactctttgaacgtggttatctagtatttgcatcaacggggagggaatgaccttccccactaaataaagtcctaaactggagattcaaaaatggcatatcgtgcacctaaattcatcaacaaagacaactttcgcaacgcactggagaagtcacttgatgaaaattttaaaggcaacattatcgttgttcacgcattcaattttaagtatgatgtaaacgggaatagaatcaaccattacacggcaaccatgttagatggtacgctatcaagtgaaaaagctgtactgaatgcacttgctggacgtggtaaaaacctgataaaatgtgataagagacgttatcagggtggcgcatatggttatgatgatgctgtttatcatcttgaaaatatgggctatcaagtagaaaaagctggagcgcctcaaataatcggtagtgatggttacgtaactatcttcaaaattaacaaataaagtactttacaaggggcttatagttcgataaagtaagccccagatagagagatttatcaaataaagcccttaaactaggagattctaaaatgaaattatcaaatcaagtgcgtgaaaatctgagcaaattactcaacaaaattgatttcattgaaacatcaaggaatagccatgatgttatggaatggttacacggcaaaataaaaggtcgtcgtgtagtgatttgcttatggaacagttgcagggagtataaaaaacctgtattgcaagtcaatatctatgatgacacttttaaaagtccagtaaagtctaaaagcgatttattagaatcctatgagataactgtaagtggcaaagtatcacgtaaagaggaaacaccatgttaatgactggtatcactgcaatcattgccattttcgcgctatataaggcatataaagcctataatctagcaaataaggcaatcacacagcaggttagcaataaccttgtagagagctttctagggcgtctcagtgatgagcaaataaagcggctagatatgagcttcagatataaagcgaaaacctatcagataagtgacatcttcaaagatgattttcagttagtcgatgattataattctctgataaatgctttaaatgtcagtgacttaaaagactactacgctgtaattgttcaagagttgagcaaacgaaaacaaaactgttgacactggtttttagatagattaaattacacatcaacggggagggaatgaccttccccactaaataaagtcctaaactggagattcaaaaaatgttttgtgcaggtgataaagttgtctggaatgatatagatgacggtttatgtacgaaagttgttgttatcttagaaattgattatatcactggtgttgcaactgtagcagataatgatataatctttgatgtcttaattagtgaactgtcaaaataaaatccttaaactaggagcttttaaaatgtatactactaacaacggtcgtactttaaatgtcacactacgtcactatgtgaacggtgtaatgcacttcgaggatttacaagctgaacagcacattttggattggcaagttgcaggactccaaaaaactgctacaggatacgggaaaaagattccaaccagttggaaagtatactacgaaggacgtttgcgcagaatttatcaagatgtgcaaagcaatagcgcatcgagttacattatagtaaaaggcaaaaaactgcatttaatgtaaagtactttacaaggggcttatagttcgataaagtaagccccagataaagagctttactactcaatcctaaattggagaacttaaaaatggctattaataaccgtgaattatcaattttaaaagcacgtttgaccgtcaacaggattaatgttctgacatcatcagcgcctgatgaaacattgcacaacattatcgggaagattcaaagtgttatcttagacgttgaaaatgtaaaaagttcattggctgacgttgcatcaggtatcacgctagacggcgcgcaatatgaaatgtcagacatgttaggcaaatctaaggtaatgaataaagagttagatttgaaaatgttccgatttgctgttaaagtgtggttatctgtcgagtatgatgctaactttgcaatcgctgactttttcgccacttggttgcagcgtaatttgtcaaatcacgattttcgtaatatctgcgatgcaatttatgcagaactctaaaaaattgttgacacttatttttagatagattaaattacacatcaacggggaggtattaaccttccccactaaataaagtccttaaactaggagattcaaaatgatgaattttttaaatatccctgatacttgccgactgttgacgcaaccagaaaatttaggcaaacctttcctgtaccatatgccagacaatacaccaaaaacatatagctacacagttaaccgctttacgggttacgctgcaaaaaacggttacaaggttactactcaaaaagtaacgctatttacaaatatcgaagagcttccaacaatcgctgtaaaactaatatttacgaagaagacgcaataaagtactttacaaggggcttaaaagttgatatcttaagccccagataaagaactttaccactaaatcctaaactggagattctaaaatggctattattaacggcgtatctatcgagactgtacacatcaaagacattaaagccggtgatacagttctttttcacggcgtagaaaaaactgtcactgcaaaggatattaaaggggattctttcatgggtaggactctcttcggtgattcttattgcttaggttatcttgcagttttaaaagttgtcaaaaataacaaataaagtactttacaaggggcttaaaagttgatatcttaagccccagataaagaactttactactcaatcctaaactggagattcaaaaatgaaatgttttcacggtactactcaagaaaatttcctcaacctgattaataacggtgataaaccatcaggcgcatggaattgttcggatatggacggcaatttttacgtgtatccagaaaataaaatctatggcgacgatgaggaagaaatagcatcagagggcattcagcaagctctaggtaatgccactatcaccgcagcttttcagatgaagactcaaaatattgttatcttagaactcgatattccagaggatgagctaaacgatgattattcttgtgataatatgtcgagtgtagcaagttttacagagtactttgatgtaaattggattaaaaaggtctatacaacagagtttaacgctatgtattcacctttttgtcttccttcattggataacccaaatttaaactatcttgatgagtctctggagcttcttgctaaaagtgttcaacagtcggacagtattcaggttttttgtgacatcatggatacactgacaggaaacattgcagaagaggatttaaagagctttttctaaaaacctatgcaatcaccttataaacactaatcagccccttgtaggggcttttagggggcttaaatcatgcttacaaccgtttaccttatcctttctatttgtaatggccattcatgtgattttaaagggcttgaggagttcacaggaagtaaagaaaatgctattcaagtttgccagatagcaaggcaagactatcccgcaagtgatgatattcagtgttactttaagacagaagatgacgacggaatctatttcgatagtgttgatggtcagtatgagattatcattgaaaaagactagacaagcctgataaaagtctgtaaattgtcaatcaacggggaggaaatgacctcccccactaaataaagtccttaaactaggagattcaaaaatggcttatgtaaccgtaattaccgataaagctggcgcatcttggtcaactcaagtaagtgataagatgtcacctatgcagtgcctaaaatactttgaacagtggaataaaggcgaggacacaagcccctttcaagtgatgcagattatccatgtagacaacgaagggaataaaacgacactgaatagtgagtactatgcaagccgttttgaaacgagaagtaaaacaatgaagcttttacgtgaatccggttatgcccatatcgccgcgttaatctgggatgacctgctaaaaagtcagcgtatcagctatgtaaaacctgaaaaaatattcatcagttaatcaataacttacaaaaaacttttaaaaaagtgttgacaataccccttgacattggtaactttgttcgagggggtttatctaaaagggattcacttaaaagactctttatagataagctcaaaaaattacttgcaatcagctatcaaaacaagtaaattactaatcaacgggagggatgacctcaccactaaataaaatccttaaactaggagagtcaaaatgaacaagtttaaagctatcaacttcatccgttcaaatgctgtaatgtctaagcctgtaaaagatacatacgaatttcgttgtaatggggtacactttgcaaccatcactaagtcagaaaacggggcttattatgtacatcgtcgtaatgttgcaaccgttgtagtctctcactttatgcaagctgtagcggaattattaccgttattcttagagatttacttagatgagtgtaaaaacgttcacaaccacgttaaaaaccttttaaacggttataaaatggcttatgaacgttctatcaagtccttaaacaagttctataaagcccctgaaaatactgtatcaatagcttatgatgtaagcggtgaaatggtcaacctctccaatgtagaacaaattggcctttatgacttacgtcctaacggttacgctaaaactctcggtgaaggtttaaccttcaatatcaagaacttagaaaaaactttaaaagatattgaaaaagatattgacgagacaatcaaaagtctgtaaattatcaatcaacggggagggaatgaccttccccactaaataaagtcctaaactggagttatcaagatggaaaacgtagaattaaccacactattgcagattgcaaccgacaaagaagatgtagcattatttcaccgtatcgaaagcgatttgttcaatggtgaaatcatcaaagaatcttatgaagttgtcggattcaaagatggtaaagcgtttggattctttgacctcgacaaaggcaacgctgttacaaagtatgatgttttgtcttgtgagattcttacaaaatacaacgaaaaaaggcttgcaacatacgccaatatgcagtaaattactaatcaacggggagggaatgaccttccccactaaataaagtccttaaactacttcctaaactggagaatctaaaaatggcaactatccgcgctactgttaacgagttcggtttttcctctctggatgttaaatttgacattgcaggcactgataacgcctttgaaatggtgaaaggtcttatcagtcagaccatcaaagattataatccttcggatgagttctgggaggaaacaaaacaagaagttctcaaggatggttatacttatcactattggggagaaaaaattgtctccctgtactacaacaaacaagattataactaatcgacgcagcggggctatttagccccagatacctgaacagcccctatttaaaggggcttttttacgtctatcgaatccttatacaatccctttccctcacctttctagaatctatccactgattcgatagaatctatctcataccttaaaagcaataactctatagtctattctatagccttttatcaaatcaacttaaatacaagcccataacccgaaagggaagggcaacccctaaaacgctctataaagctctataacagccttatcaacctaacttaagggattgcattaacctatcttaaaaagctctttacagggctttatagaggcttaaaagaatcttataagggtgtaagctttatcatctcgttagttatcttgtgaactactaaaaagggcttgttattgtcttaaaagtatgttataggggctataaagttactttgaagtagcttaaaagttacgtaaatgctagcccccttaacaatttcttaacaatccctacatagttatgcttttaagacacttgttagcaacttgttagccccttgttaaatctctgttaagaccacgtaaaagccttgtaagagtctttgacatagccttaaaagctcctgtgaagccctataaagagttatctgtacagttggggtgtaactactaggaagagacttaaaagagcttataaagagctatagagagcttttaagaggtatgtttaaggaatcactaagaaaggaaagggaacgataagaaagagatagtgaccatgttaatagctagttaaaaagattaaacacttgttagaaacttgttaattatcttaacaaaataactctttaaaattaacttgttagctcttgttagtcatctgttaagattctgtaaaacctatgtatcaactgttaagaaactgttacagccttgttagttctgttaagaatctgttaagacctttgaagagttgttaagaagatgtgagaactgttaagagattgttaaggatattttaaaattttgcaaagtacttgtaagggagctgttaagggctaccaagcagatatacatcctaatcagatatttttgagttccttcaaagaccctaaaaaatgacttgacagtcttattttataaaaattttaaaattctgaataattacctacacagtcttttaaaaatacaggtagaaacaggcttataagataccttgttagtaccgtgttagaccttgtgagataaggtctgtaaagatattcctgttaagtttgttaaaacagactatatagaggcttagtatttcctagtgaacacctatagagagtgtcataggtaacatagagattaagaggtgtataggagcttctaagaaggtgtagagagatgtttaaggtgattgtataggttgttaagaaggcttgttagaagagtgtttagatggctatttagaagggctatacagagggctattaagaccactagatagttactaagatactatatagtactatataactatatatagagagtaagattaagaaggttgttaagaaggatagatattttattcacatatgatggtgacccagaggttgggacaaccgataaaattttataaaaattaaaaagcccccgattaaggaggctcttaagatattttaaatcaggctttctaaaactgtcttcaatgatgacttagttgtctgataaaaatgagtgaatccattgttgttatcgaatatctgcatcataacagcatctcccttgattgggtacactcggatgtcatagtgaaatccattaaagacagcagaaccattacagaatacactaaaatcatccactgagatatactcttcatgacctgtgatttttatacagacacctttactcggtctcttagggttgatatcttccataatagacatactctgtccaccaagagataccatagtgaccactttacggttcttctgtttaaagtacattttaactttctgcaaagtgtcttcatagaacggataagacctttctacaaagattccttcaagtggctctttaccattttcaacttctctgttatgccgtacttcaaagataatttgttcgaaccagtcaagattttcttcggagagtgcttctcgaacatcactccagtcaagtactaggtagttaccttcaacttcttttaagttatctttttccatatctatcacaccattatcgtaaaacttgatattctggtactgcgaatttattactattgttcttgatgaggtcatcctctgaaactaaaaatgtaataccacataagtgtctgtaacgactatcatactcgaatatcttaaacagatatttaccatcatgataaacctgttgcacttcaccttctgcaacaatctcgcctgtaataaaattttttagtttatacacattaccaactttaggtactgttttcatctcaggctcttttagtgctacacctatttttgcatcaccgagtaaatgagaactctcaaaagctacgtgtttcatataagcttctgagcattcccagataaaacagtgtacaagaaccttagcagcatgtcttgaacagtttaacttatcacaaatttctgtgtacatctcatctttagtcgagttgtcaagcattgctctttgcactatctcttttactttcataagctctccgaataaccctattaagcatctctaaagtcagttttccagactctaaatgtggcataacaagctttaaagctttttcaacatcatgcacaacatctattataccttcttcataggcttctacaaggatatcttttacgttttgttggttatctttttgtggtattgctagacgcatattaaactcatttgcttgagggtggtcactaccacgccagtaaccatctttgttaaagctgatgtagtcaccgtggtaaaagtgtacaccattagctttaaacttctccagcacaaggcattgaattgggtactcagtattccactccctgactcctataaccttcactgttgcgatgtactcctgtgtttttgcatctatgatgtcaagttcttgaccagctatgatttgcatattcgctaccttctaagtttctacaaaggggctatcaagtaacccctcaagttattactcagacttttcagtcttcttgtcggatttcttactagtcttcttctcagctttctgctcaggctccttctcagaagttgccttaataaccatatcaagaagctctgataagtcactcttcagtaaagtaacaggctgctcattgtagaagtttttgtcaagataaactttaaactcttctatagaaggaaatccaaaaattggtacaggtgtcttaaccattacttagtctctccataagcatctttcaagattgccttgttaatcatttcagcgattgcaaaacgaacacatacagctataattgtaggttgcattctttacttacctcttcaagtttaacttcagagtccttaagtcgtttcttatgaactctgaatctcattagtgagatgatgataccaactaaagggacagcatacaagtaccaaacatcatatacctttgcagtaatctgtgtaatggtcaaatcttgagctatggaactgattgctgatactgccagtaatgttgccaagaaaaatgccagtaccattactgtactcaaacaacctctggcatggtgttcatgcttaatgcacttattcttttcgtcaacaactctgttgtagtcgtttgtaaagtctctgtagaatgctttcaagtattcttgagtgtagccttcaaagcaacctgtaccataccaataatcaccaccaaaatgtgctatgataccggtatctccatttggttttgttactcttagggagacatgatgaccagtcttctggtaatctatcttgtatctttcttcgtaaatcattttccaatccctctcaatcgtttgttccactcaaggtcaacaagtctttgtaggactttacctctaggtgttacaccttttaaatctgcgtcatagcaatggtaaaaatcaccttcagcgtgtctgccatagcatcttcttatactctgacttctacgatattgttctaatagagacagcttgtagtaatcttcaactgtagttagttttttcattctttcaccatagcatttctgaactgacgttgagtttctcttgtaatttcgtctggagtaaaccctgctttcagcatatctctgaaaagaacttctaagtgattcttttcaataatgtaaattgcattctgcacagatgttttaagttccttcaggttactgctaatttcttcgcacttgttgacaatctctgtatcaactttcttaaagactggcatggtatatctactaccaccattagcagcatccatgaaaaatttaaaagattcctcagagtcctttaaagcaatccctataaagttcttgtaagcacctgtgaaagctaaagattcaatctcagcagttgagtatacagttcctgcacacagtcttgcggaggtactaaatgtgtggtttggtgttatgtcaaagtctaagttcttcagtggtcgaaaataaactatcccattgtgtgagatgtgtgttacaacagcctcaacactctttgaaggattctgtttaacatacaaaataattttatcgtgttctttcactttagccatatctattctccagaaactaaaaagggaactacctctcgatagctcccatcataatcaatattgtatactcggtcaagagtattttttaggcagtaatgcactgcgcttgttactctcttcactcaacagtgcgataaattcatcacctttacccttccacggactaaatgtagggatgtgttctctgatagcatcaatcactgttttcagggcgttattttttaaccaccaatcagacactgctgatgctacactgctaataagcaccatcatctgtgaagattggctcagagatacatggtgaaatcatagtggtgatgatagagccattattcatgtaatatgttcttttttcaaccttatcaagaagcttatggaggtctgcaaagagactcacaacttctttatggtcaatatctttttcaagatttgctctgtatttcagcagtgcagcatcaacctctttatcattgaatttgaagtattggacttcttcattcacacatacactgatattgttggtgtttatcgtcaatttgcacagtttgactggagaattgatgttagtctgaaaaagtgctacacagccttctacatttccgaaatgttttactaatgtaacttctggttggatatgctcatgttcttctgacattacagtttcctcattaaatactttttaagttgtgtgttaggtttctcaaaaacttctatagaagatatcttaacagactcaccacgcataccagtatgtttgaatatgtagtactctagcatccctatgtactttgctggtaagtcatgcttgacatataccgtcacagaatcttcaaactcaacaacctttgtaccatctttgtagttaaactctttaggatggttgtagttgtctatatcgtacattaaaaagagtcttttacgttgtaagtcaagcttatttgttaaagactctttaatatctgagaagtttttgtacactatgacatggagcttactcatcgttaaactctctgacgaagaaatagttgactttgttattacctaccataaggtcaaagcaggtattttcaaaaggtttgttgtaggcatcgtatgaaatatatgggtcagctacttgcttagtgcttaacttcttacttgatgtatttaagaggccaccatacagcttcttgatagcctcttctacaacagaccagataatttcgtcagtaatttcttcgtacaggtcaagttcacgctctagtgagaagtcacaaatagggaaaacaacctgtactttactcattaacgaataacctgtgagacttgaattgcttcagttactgacaagtcacctactttctcttctttgataaaagtgaatgtgagttcaacaggttcttgctcttcttgctcaactggaatgccattaagctcatcgcggattgattgagttgtccagtcttctccaccatctggataatggatggcgtaaagagggaactccatatcataccagccaaatacagggcaaccatctgcatcatctcgcattctgcgaagtgtgctacctgagcctgtaaagcgaagactaatatttccattacactcaaaaatcactgcgtcggcaagtccagcatcttctcgaccatcatggccaaaagtgtcaacttttacttgaatctctttattcataaaaacctctctctgcttgttctatttttgctcttaaagcttcgcaatgttgtaaatgatatttagcttcttgttcatgtgttgctaactgcctttccagaacagatttatagtaacctgcaagttgctcttttgtcaatgggtgctctgaaataatatcaagtccactttcaccaagagggttgaattgtccatgttcgttgacattgtaagtctcaaacttgaacaggccattgttcacagactcaataggtgacaactcaacaagctctacagtaaaccgtgtatataccttgtcacctcttgaaaccacattgttcccgacaatgcgtacaagcgagccattacgagtgtacttaaaagttccaaagtcactagcccaaagtttcatagctttctccttagaaaataaaaaaggctcccgaaggagcctatgaagatattactttggatatacactgtcaagataaatgtcagcttccatcctacgtctgtttttcaggccgtttgaagtgaccttcttacctttgactgtaactttgttccaccactgcatagcttctgcacaacctaccttattaccatcgttgtggcgcttgataaatgttgagtcctgcatagctgtgataccgatgttgtatgtttcacttacaagtgcatcgaactcattctgagaagttggaaccttgatagctttgttcactgctgcaacgaacttttcaacatccgcgagaagatactgttcagcttgttcagcggtgattttcattcccatcttaacaggcttaccagcaatacggatagtcccatatccaattgtagggattccagcagaatcttcgtaagcctctagcttaagaccttcaaagaacttaatagcttctaaaccttttcttgagagttgcattatgcctcccctgctgggttaactgtaactgttgctgcattggatgttacagagccacctgcaccagtaactacacaggtgtaacttcctgcatcagcagtggttgcaccttctttggtgtaagttgcagtagttgcatcgaggatgtcttcctcacctttcttccattggtaacctgtcgcacctgttgccacaacattcaacgtcaaggtctcaccttcagtgatttcttgattggttggctgttgagtgattactggaagtgcatttacagtaactgtggctgcgttagatgtgacagagccacctgcacctgttacaacgcaagtgtatgaaccagcatctgttggcagagcaccagacttgctataggtagcatttgtcgctgaaggaatgtcagagccatctttcttccactggtaacccgttgcacccgttgcagtcacttccaagctgatgtttccaccctcattgatggtctgactagaaggttgctgtgtaatcacaggtagtgcgttaacagtaactgttgccgcatctgaggtaacacttgtcccagcctctccagatacaacacaagtgtataaaccagcatcagaaggtgctactgactgttttgtgtaagttgcagaattggcactagggatatcctcaccatccttcttccactgatatccagtggcgttagttgctagaatgcttagagtaagtgtgtcaccctcattgactgtttgacctgttggttgctgagtaattgctggtggcttgatagcatccttcagcttagcattcaacattgagaacggattaactcttgccaaccattcacagtaaatagtgtcaacatctttaccattgatgattgcatactgcaaatccatgaagaaatcagcagttctcatctgtgcaccaacactgtaaaggagttcatcactaaaaggaactttatagtctggtttatagtcaaacttctcaacttctgcaatatcagcttcaggccaatacgagctataggtaagtggtaaaatagcctcttgatatgttctaaaatcatacctcttaccagcctttacgtttgcaacgaagcccttcacaaactctttgaagtctgggtaagtctttgctttaatcatttcttttcagcctctaaatgtgcgtttagtctaaaataacctttgtgattcggagatacatcaccaacaacaatacctttaaccttataacctttaccaattacatactgaatatccataaggaatcttccaagaccaacaatatggaacattggatataatagattctcagagtctggaatattgatttctggtttgtaggtgcgttgttcgcttgttggtgtaatatcttcttcgggccatttactgagtctccatgtcaaaggtgttgggataacatcattaaggttgtacctttcaccattttgcacggaattgatataggattgtaggaagcaataaaagtcttttgcactcttagctttcattaaatatccttataaatagttaaaggggcatcagcccctattcacacttaagctttggtcttaagtaggttcttaagttttttaagattcatactctcatcaaacttaaaaccaaatccattgacataatcaatgaactcggatttcttactgagtgacaatgcgtaactcatatcaaagttcttacttgtttctgcgtctggactagagttcacatcaaatgaaatttctgtaggctcttgcttactttttctcatattatcaatcaacaaacatgtatagtttgctggatagaaatttacactaccatcaacgtagctgtacttattattatggataaggttggaaaataccttaaggaatgtttctgagtcgtggcaaacaagtttgaattggctgctctctccaagcgcaactaatgagtacggactttcactatcaaagtcataatttggattcgatgacgtcactgttacacgcatcaagttattagcaatagtcttctgtttaaaagaattttgaacatagtgaagacccctctcacactgattgactagctctttaagtaggtcatttgcatatggtgagttaattgatacagagccgtcactattgtaattaaaacttactgttaacatttttcagttctcctgcgatttataattttgctgcaatagagaaacgaagtaaactcactggaagaaaccactaagtgttgttcactagattgagccattgccctgaaatacattccagtcaaagcatcatagtgactattctttccaattgaggttatatagccatgactctttgcagtttgatataaatctataatatctgcgatttctaattgggaactacacatagataatcctcttgtcttctgtaattttgaaagaacaggtacagaccaatttcagaggatgaatagtagattaactctaccctttttgattccttacagtgattggtattcttacctttcttcggtttatttgattttctcattaagtctcctttgtagaacaaggcagacctacagctttaagtaagatggtacagtaatccatacaacaagtcaagaactattgcaagttaaaaaagttgttgacaaagtacttgacaaggtgtaggcttataaatacttagaagataacttaaaaggttcctctaaaaaggctatttaaacagatatctttctggatatctatcttttatcttaaaagccttttaagaggtcttataagaggcataccaatgaaaaacagaacaaacaaaggccagtttaaaaaaggccagtctggaaacccatctggaagaccaaaaggctctcgtaacaaaagttcactcgtaaaagctcaactgaccattgataattctgctgagtttgctgcaaagttgtttgaagcgattgttacaagggacgctgctaagcttgcagagtttgggttaaacacagacgacgtaaccatcaaaagcatgattgaggtcggtaaaactatcatgacccactcagcaggtgaaatgaaagcaattgcagcagacactaagaagactcctgataatggtggtcagtctcagacagacaacaaaccaacgttctctgctgttgcaacccttaaaaaataattttaaaagatgttgacagactctataaagttgctctaaagtctgtcacatcaaacaacaaatgagagaagagagtaaaatatgagcgaattatttaaacatgcgcaccttcatgcaggtcgaactgaaaatggtgctgtaaaccatacttcatcaatgtctgctcttgtagacttttacaaagctgctggttcaagccgtagcaatgtagaaatcttaccagacctgttctacaaagctttgcgtgaggatgttgatgttgcagttcgtattttgcttcatatgcgagatgtacgagaaggtatgggtgagcgtaaagccttcagaactgttttgcttcaagcaattgaagacaaagttttagagtctacgcaggttcttcgcattatggataagattgcagaacttggtcgttttgatgacttcaaaatcttcgtaggtactcgtttcgagacagatgccttcaaacatttagaagcagcattactagaccctgcaacagcaggtttggcggctaagtggttaccacgagtcaaaccacgtcataagcagtttgtaaaacgtttctgcaagtttgccaacttgagtgagaaagagtaccgcacactgttgtctgcactatctgatacagttgagcaaaaaatctctgctaatgagtttggtaagattgactacagcaagattccttcacttgctgctgcacgttaccaaaaactgtttaaccgtaaagatggagagcgctacaaagcttacattgagtccttatcaaagggcgaggctaagattaatgctggtgctgtttacccatacgatgtgattaaatctgttaagtatggtaatgcagatgttgctaatgagcagtggaaagcactaccaaactggatggcagaaggtgaaaacatcctatgtatgactgatgtttcaagctcaatgtcttgggtgaattttggttcaatcactgcacttgatattggtgtatcacttgccttgtatgtagcagaacgcaatacaggttgctttaaggatgagttgatggtttattcaacaaaccctcatttcattgaactgagtggtgatttacgaaaccgtcatcgtcaggtgatgcgacacgttgaatatggctcaaccaacttacaagcagcttttgaccgtattcttgagacaggtaaaagaaacaacttgactcagaaagatatgccaagtaagcttatcatattctctgatatggagttcaatcaggttgatggagctaacggtcgtacaaactttgaagcaattcagagcaagtacaaaaaagctggatatgagatgccacaactggtattctggtacttagcaaaccgtaatggtacttgcgaagtgtccgttaaggataacggtgtagcaatggtatctggtttctctccagccactttaaaagctctgcttggtggtgagaagtttgacccaatcagcgtaatgctcaaagcagtaatgattgaccgttatatctggtaaaaaagttttaaaaagggtattgacaatgtgtttaataccctttaatatgttctacatagaaacgaaatgagagcttttctaagatactgaaaaatattttaaaaaagttcttgacaaccactaaaaaataatgttaaagtggttacatagagtttgaaaagtttatctctgtttagctcagcttggtagagcgttccgtttggggcggtaaggccggaggttcaagtcctccaacagagaccaaattaatgttccagtagacaaaatggtaaagtcaccactctttcaaagtggatatctgagggttcaaatcccttctggaacgccagttttgacagaagaccaattacagcaaacttaatcttattcatctgaaggtaaatcggacaaagaagagatttggtctggtcattaagaattgcgggtatagagaaagggcgtctcacatgtctcattagcatggtatcggcaggttcgactcctgcacccgcctccaaatttacagaagaccgtttacagcaatatttattaaatttttagcggaaaaattgaaagatacggtctggtaatactaaacatggttaggaagcacataaggtatgtgcggtcgcctgttaagcgaatggcacagggttcgaatccctgactaaccgccaaatttaggagagaagcgattgctcaccgatttgtaaggtgcaagtccttagcctgaatagaaattaaatgtgtcgttatcccgtagatggtagcggtggggactgtaaatcccttgtcattgagactcggtaggttcgactcctacacggcacaccaataaaggttatgtagtttaatctggttaaaatactcccctgtcacgggagatgatgagggttcaaatcccttcgtaaccgccaattttgagagggctatttagcccctcccttaaagggttcttacgagtatcctttaaaggagcggaagaccaaatacagcaagtacgtatgatattttcaagccaatttaattttgaaaaatttaaaacttggtctggctcaacaaatttacagaagaccgtttacagcaaaacttaaacaatctatttctccggtaaagaaaaggtgaaggttcgattccttcactcggcagaggtcgagttggtgtaatggtagcacttaagatgataaacaacggtctggtaattatctttgtagataagttattaagcttacctgtgagtatgcgaccacaaagggtgaaagggtaaattctagatttaaacccaaaaaggcacatcgctacagaccttaagcaagtctgggtagcttatctacaaagataatttaatggaagtgtagcagaatggtgatgcggcagacttttaatctgacaggcgatgggttcgaatccctccacttctaccaatatggttcagtcgcagataaggtaatgcaggggtttcataagccctatgaatatgggttcgattcccatctgaacctccaattgtgggttagcataaatggtaatgcaaacggctgataaccgttagaagagggttcgataccctcacctacaaccaatttcaataaagttgttgacattgagatgtgactactttatagtaaccttagttttcgttgcgtagcgtctattttgcaaatttaaaataaatgcaaacgacaatgtttttctggcagtagcttgataggctaaacaccagtgaggtcttccaatccctcatcaaagaatttggcgtactcgcccacggtatgattaataaggtgggcatctttaagggctttctaagagagtctttaaagataattacggggcgtatctcagcggtcttctaaaccgccgttaaccgagtaagtggagtatgcgggttcgagtcctgccgcctcgaccaatttagttagcagattacttagacgacctaagcgggtcttcctgtagggaggtggtctgtatctcatgttttccagaacatgtaaataatctgagaaggggctttacagtgttgagataatacggtaagcttcgaattatagtatgggacgatgttaagactctaaggcatgagcaacggcctccaaaaccgtttcaaaggggttcaactcctccgtcccatgccaaagtcttattaggggtaggtagcggctaatggcagccaaacagtcttgaaaactgttgccactgtagagatacggtgagggttcgactcctttacttaccgcctaataagatttttaaagccaagcttcattcggatgttgctttggtatccctcgtgtattgtcgtacacactgataaaacacctagtaggtgtcacggagaagagataatatcaagctctccaaaggttctagtcaccggattaaacaagactatgcaaagaccttttaggtctttttagagggcttctaaggttattacggcttgttgtggaaccttgttgcttaggttcttagaagttctctaaaaagatttaatgggagattgacggtaattggtaaacctaccatccttagaagttggtgtttgagggttcgaatcccttgtctcctaccaaattaatgcaggtgtagcaaaatggttatgcggctgactcttaatcagtaagacgatgggttcaattccctccacctgtaccagacattggggtcatagtttatatggttaaaattcgagttttgcaaacttgggaactgagttcaattctcagtgactccaccaattagtgcatccatagtttaaacgggaaaattacagtcttccaaactgaggttgagggttcgattccctctggatgctccaaattaatgctgctttcgtataattggctattacacatcccttgtaaggatggagatgcgggttcaagtcctgtgagcagcaccaattcagaggtcaagtgaaagaccgctttgagtcaactgaagaccgtaacaaattccacggagttgagttagcggcacaacttcagacctctttcacactcgcttagtttatatggtaaaacatcacccttacaagatgaagaaaaaggttcaagtcctttagtgagtaccatgttccagtatcccaattggtagaggatgcaagctcaaaccttgtactagtgacggttcgaatccgtcttggaacaccaattttgcaggattagttcaaatggatagagcaacagtctacgaagctgttaataggggttcgaatcccttatcctgcgccaatttaaagaggctatttagatgagatacttaaagtatgcttcatggattttcttagctttgttagagccatttgcagaaatcttagcagttatcttagcaccttttgtagttccattctacagtgagaagaaaggccacttacctttcggatttagatggatggagacatatgacaacccaattgatggtgacgaaggtcatatcgaacgatgggctaagattagaaagattggtaagctgggtgtctacatgcagagagtcggatggctctggagaaacaaagcttataacttctcttaccatgtattaggaagagatgtaaaagatgttactaagtggaaaggtaatatcaacgtaagttctgaccctgaagataatcagacaggttatctcctaatgtggaacagtaatgcttggggattattcgcttttatcccatcaattaaagtctttggtaaacagttttactggagaatttatattggatggaaactaaaaagtgttgtcccagaagaaagagcattctcaaggggaagagttatgttggcattctttattcatccactaagaaagtaaagatttaaaggggattagtttacaaggttaaaacctcggtctttgaaatcgaagaagttggttcaattccaacatcccccgccaatgctccattactccaattggcagagaggccagacttaaaatctgtgttatgtatcggttcgaatccgatatggagtaccaaatttagcggtatagcataactggcaatgcaacagtctctgaagctgtcctattaaggttcaaatccttatgccgctgccacttctaagggttcttacgagagtccttaaatgtggccttatcataaatggtaatgacccatgctgtgaacatggtctatacgggttcaaatcccgtaggtcaccccaatttatagtccaagtagcttatatggttaaagcgcgtgtctgaaaaacatgagaagagggttcaaatcccactggactaccaatttcaaaggtgcttaatgaaagagatgacagaacaaggtaaggagatttttaatctcttaaaaaccggtaaagggttttctaacccacttattactggtgcagcagttctcggtggaaccgtagctgcttctacatcacttgtaagctctattagttctgtaacagaccctacaatgcaggagaaacttgttgctgctggacttacaacagtccttctaaacagctttacaacaagccttacaagcactacagcaactactaagaccctgacagactacggtcaaaaatctattgatgagttttcatcacgtatgcaggtagcaaaggggtattccaatgttatgggtgcagcaggagaacaagttggttgtacaccgttcagtggtattatgggtgttgctacagaatatggtcaaaaagctattgatacaattaacagtacactagagagtgttaacgatgtattaagtgacttacaagacgctattgatgagggtcttgatactatttctgatttagctaatcaggctgttagtaagattaatgaaggtatttcaaagattacagcttatgcagatgaagttgtgcagatgattgaagaagaagctgcccttattgcagagtaccttaaaacgaatatcaatgggttcttagcaggtatcttaccagactggtttgacgatgcctgtaaaactggtgtaattgacactattgcaacaccagaaatgaagaacgcattacagaaataaatggaagattaaccctaaaaggtaagggagcagtttgctaaactgccagtagctgagaaatcggtgtaccagttcaagtctggtatcttcctccaatttgaatccgtgacagaaatggctatgtgcctgtctgcaaaacaggtttataagggttcgagtcccttcggattctccaagttattttactctctctcaattaaaataataataataatgccctgctataagtattcttcctttcgctaccgaagagtatttttagacagggcttttttacagagttatactttataagaaggcttatacagtatgtctctgacgtacattgtggtttctccttgacggtctctgtgccgtcttttttaaggggaaacatggttaattatttggagaaaacataatgagtgagaccgtttacaaagaactttatgaagctaataaaaagctagaatttatgcagaacactatcatggcaattgcagatagattatctgtagcaacaggcattgatattaaagaagcatctatggatgcactccttgatgctgttgatgaaaagttcgaagttaagaaagaagagactgctacagactctgaataattctatttgcggaggcgcttaatggacttaaatgctgttaagcagaagcgagtggaagatgttaggaaagtcctagctggagagttggggctttctgatgaagtaaaagaaattattaaatcattcggtaaagacccctctaaattccttccaactcaaattctgactttattaagatacacaccagaccaagttcgcctcatctttaaattgatgactgataagaactatgtagcccctcaaccgggttctcaagaggtctttttaaatactaatgctgacttggttctctatggtggtgctgctggtgctggtaagactgccgcattgttaatggactctttaagatttattgaagaccctaactataatgctgtatatttccgtcgaaatacaacacagttacaaggtggtttatggcctgctgcaaagaaactatttggtaagtttggtgggattcctcatgagcagaaaatgactatcacattcccttctggggcaactatcaagtttacctacctagaacttgaaaagcacgctgaaggtcatcagggtattgaatactcagcaatctactttgacgaaggtacacacttctctgcttcacagatttcatacctacagactcgtctgcgttctggtgctgaaggtgattcatacatgaagatttccatgaacccagacagagaccactttatttatgattgggtagaaccattcttagatgaagaaggttatccagaccctgaaaagtgtggtcgtattcgttggtatgtaatgaatgatggtgtgatggtttctgattgggagagagacaagattcttgaaatgttccctcttgagattcctcaaacatacaccttcatctctggtacgattgatgataacccaattcttgacttcttagaacctaagtaccgtggtaagttggaaaacaacacccctgtaaacgttgcaagacttcgtttcggtaactggaaggctcgtgcagaaggttcaaactactggcaaagacaatggtgtgagattgttgattcactcccagaagatgtatttgatgttagagcatgggacttagcagcaactttaccatctgagattaaccctaatccagactggacagcaggtgttaagatgggtaaatctaaaaaagacggttgctattatatcattgatgtagtaagatttagagatagaccctctggagtcgaaacacaaattaatttgactgctgaaagtgacggtaagcgaactggtatttttatccctcaagacccaggcgctgctggtaaatcctacgcaacatccctcatcaggaaacttgccgagaaaggctatcgtgcaagagctaaaccaacaaataaagataaagttacccgctttgcgggattttctgctgcttctgaagctggacttgtaaaagtcttgagaggtagttggaacgaagcttactttcaagagcttgaaggcttttgtggtgatggcaaaactaaagatgaccaagtggatgctaccagtgatgctttcaacagtcttaacgaagttaaattattcaagccaccatcaatgggtgctcacacagacttagtgagaggaaacccatatgaggggcttagacgttgatagctaggtgagaagaatggcagatattacagaaacacaagaaagcttaccaccatttagaatgggtgaagtaggttctttgggtctgaaggttaagaatggaagaatctatgaagaacctcgtcaggcactaaggttccctgaaagtattaaaactttccaattaatgatgcgtgaccctgctgtagcagcatctgtaaatattattaagatgtttgtcagaaaagtcaactggagattcgtacctccaaagggaaaagagcaagaccctaaaatgcttgaaagagcagacttctttaattctttaatggatgacatggagcatgattgggcagattttattaattctgtaatgtcattctgcacttatgggttttgtgttaacgagaaagtttataagaagcgacagggtaaaaaaggaaagtaccagtcaaaatttgatgatggtctaattggatgggctaaattaccaatcagaaaccaatcaacacttgataagtggtattttgacgaagactttagaaaagttactggtgttagacagaatctgagaaatgtttcacatattgctggagcaattaatcttggagaaagaccactaacaagaaaacttccacgagctaaattcatgctgtttaagtatgatgatgaatatggaaacccagaaggtcgttcaccattacttaatgcctatgtaccgtggaagtataaagttcagattgaagagtacgaagctgttggtgtttcaagagacttggtaggtatgccaaagattggtttaccaccagattatctggatgaaaatgcagaacctgaaaagaaagctttcgtacaatactgcaaaactgttgttaatgatatgattgctaatgacagagcaggtttaatctggcctagatatatcgacccagatactaaagaggatatttttgagttctcattagtctctagacagggtgctaaagcatatgatacaggttctatcattgacagatattccaagcaaattatgatggcatttatgtcagatgttcttgctatgggtcagtcaaaatatggttcattctctcttgcagattctaagacaagcttattagcaatgtcagtagatattttgctgaagcaaattaagaacgtaattaaccgtgatttagttgcacagacttatgctcttaatatgtgggatgatgaagaacatgtacaaatcacatatgatgatatcgaaactccagaccttgaagcaattggttcttatattcagaagactgttgcagtaggtgctttggaagttgacaaagagctatctaacaaacttagagagcatattggtcttcctcctgctgatgagtctcaaccagtatctgaaaagctttctccaaatagccaaagccgctcaggagatggttataagaccgctggagaaggtactgcaaagacaccttcagcgaaagacccaagcacagcaaataaggcaaataaataatggctgaagttatctctatttcaaatgctacacgagtgcattcgtataggggtgtccttatcattactgataagttatctgtagaggctggctcaagggtcagcctttcaggttatgttagtgatggtggaatctctgacgttttcactatttgcaggttacttgatgcaccaatgagtggaaaaccgtttatttcaggaaattgtagtgaaattgttaaaattccatttgacagttcatgccttttgggtgtaaagttatataactgcgagaataaacgtatcaatgttaatagcattgaagccgctttcattaccctcgatactgcatttcaatctccaatgacagttaataaagaaacaaacagacttgaatacattttttcacaaaatgattacaaagtacttgtcaaaggtaaagtatatgatatgattgtaaatgtggtagatgaatctggtaaccattcaacagtccttaaacaaaaagtaaggtttaattaatgggaacattaactattgatggtaagaataaaatcctcgccacgctaaccccaacgactattattttacacaatgtagacccaacggcagaccctacagcaaataaggttactcagccagtggctatttatttttctgaaccggataatggcttaattgcctcagaagacacagttaatattactgtcccagcttctgcaacggtctcacactatagcttgtgggatgctaacgataaatgcgtggcaactggtgctcttagcaaacctcaattctttgctgaagaaggtatctatgttatctcttcagtctctgtagatttaaacaaatagggtgagtaaaaatgagttcgaatatcttcagacttgctgatagattattcaaccaacctttactagccactgaatcattagctcactcagcagcaacttatgtgaataacagattgctgggtgatgtccaagcagcagtaaactttgataaacccaaaggtgaagcaagaagtcttttaaaagtaaaagatgacattgctattatccctattatgggtggtttaacccatcgtatgacattcattgatgcaatgtgtacaggtggattaagctcttatgaaggtttgcgtagaggctttgacgaagctttagcagatgagtcaatcaagactattgttctgcacattgattctggtggtggtgaagcttcaggttgctttgaattagcacgtcacattatggcttcaagaggccaaaagaaaattattgcttatgtagatgagttcgcttgttccgctgcatacgctcttgcatcttctgctgaagaaattattgcatcaccagatgcagatgttggttctattggtgtaattatggttcatcaggaattaactaaggcatttgaaaagaatggcgtaacaattaacgtcatcaaagctggtgagtttaaaggtatgggttcaccattccaagcactctcagaagaaagcaaagaaagacttcaaaagagaattaatgatacctacgcaacctttacaggttttgtagccgaatctcgtaatctctctgaagaagctgtaaagaatactgaggcgaatgtttattctgctcaggaagctcttgaacttggtttaattaactcaatcatgtctcaagatgatttcttaaattacttacaaggttctgaagaggctcctgtaagtttaaacgttaacaattcaggtgaagaaatgactgaacaagaaaagcaagaactagaagctttgcgtcttcaggttgctcaaatgaaagctaaagaacaggaagctgctttgtcagatttgactaataagatttctgcttctgctgaagcttttggatttgatgcaaaagaagctgcaacgactattttaggtgctggtcttgataaccctctgagtgttctgtttatgaatgctatggaaggtgctaaccagaaacttaatgaaactatcgcgtcccatgcttctgcaatggaagaaaaagaatcagaaattaccaagctgaaagaaactgctggtgctgttcttgaacattccaacgctatggaagaaatgggtaatgacggcgaagctgatttggttgaagaagaaaaagaaccagctaagaatgcttccgaagacaccgctgaacaacgcaaactggctctccagaatgctctaaaatctcttatcaaataaggaacacaataatggcatatcaagattttactaagttaggtaaaagagaacctctgaatgatatcattctttgggaacaggttaccccaacaggccactctcgtaaagagtacactccacaggcatctacagaatatcgtgtaggtgaagttctgaaggaagacggtactaaagtcgcagcaggggaagaagctcaggctgattctgtatgtatcgttaacttttattcagacctgcaactgtcttaccacggtcagttgaaagttgttggtatttaccgtgacgcagaactgaaagacatgcttactcttgagtctggtgttaatgctgagaacgtcaagaaagctctggctgctaaaggtattgatttcgtaccaactggcctgtaataacaataataagacattctggagaattttacaatgttgactaattctgaaaaaagcagatttttccttgctgacctgactggtgaagtccagtctatcccaaatacttatgggtatatttccaacttaggtctgttccgttcagcaccaatcacccaaactactttccttatggacttgactgattgggatgttagcttgcttgatgcggtagaccgtgatagccgtaaagcagagactagcgcacctgagcgtgttcgtcaaatcagcttcccaatgatgtatttcaaagaagttgaaagcattactcctgatgagattcagggtgtacgtcagccaggcactgcaaacgaactgactactgaagctgtagtacgtgctaagaagctgatgaagattcgtaccaagttcgatattactcgtgagttcctgtttatgcaagctctgaagggtaaagttgttgatgctcgtggtactctgtatgctgacctgtacaagcagttcgacgttgagaagaaaactgtttacttcgaccttggcaaccctaatgctgacatcgacgcttctattgaagaactgcgtatgcacatggaagacgaagctaagactggcactgtaatcaacggtgaagaaattcacgtagttgttgaccgtgtattcttcagcaaactggttaagcatcctaagattcgtgacgcttatcttgcacagcagactccgctggcttggcaacagattactggttctctgagaactggtggtactgacggcgttcaggctcacatgaacaccttctactacggtggtgttaagtttgtccagtacaacggtaagttcaaagacaagcgtggtaaggttcatactctggtgagcattgatggtgctggtgcagaggttggtgtaggacacgctttccctaacgtttctatgcttggtgaagcaaacaacatcttcgaagtggcttatggtccatgtcctaagatgggttacgcaaatacacttggtcaggaactgtacgtattcgaatatgaaaaagaccgtgacgaaggtattgacttcgaagctcactcttacatgctgccatactgtactcgtcctcagttgctggtagatgttcgtgctgacgctaaagactaatattcttaaggagggttatgaatgtgttatacaggcgacccagccaataaccctcttgatagagtaagaatcctctgcacagacaccaataatgatgaaattcttattgaacagtctgtgctagagtggttctatctagaatctggaaaggatgaaaagaaagcagccatcaaagctcttaaatatttactctttcaagtagccaagatgggagatgagaaggttggtggtgtttatttacgtaactcttccagattcaaatctctgaaagctgtttatgacgaccttgttaaaagctctgtttcaggactaccctatgcaggtggtattaatcagtgtgacattgatatgcgtcgtcagaatccttgctctgtcaagaaatacacagaatatggtgatgctgccagatacgaaggcagagattactgcaaccgtgttaatggcgtatttattatcgagcgagatgaataatggttaaaagggttattcaccccgctagagcaaaattagtcggggctatgaagaacttgcaaacggctaatgctcaagttgggtattttcaagaacaaggtcaacatagctctggtttttcttatcctgctttaatgtatttacaagaagttattggggttccttcagcttctggtaaagtatatcgtaggttgtttgaaatcactatgatgctaaacagacagaccttgttagagcagactaagaagaatctatataagcaacttagcagtctcaacgtagacccctcagataccttagaagcatttgcaaagaatgctcaaaaggcaattaaaagaggttttggtaattctgctatcctccctcctaacgcaccttccacagtcaagaaaaaaggctttaatgcacctcttgttgagacaggtgacttaagggataaccttgcttataaaatttctactaagaagggtattaagaaatgagactcttaaacagacacagctttgtagtaaagcgtaaagtctctgaagacggttattataatgatgatggtgattgggtagcttcacaagatattgtagaggttaactgtaaaggtaatatccagccatatatcaaaggttctgtaaagaatggtacacagattgctttaccggaaggtattagactaaccgatacaagaatcctgtatactacatataaacttagaacttcagatgatgtagagtggaatgagtctgatattgttatgattgatggtcatgagtatgaagtatttatgactatggattggtcacagcaattagcccatacatcccattatgaatatatcattattagaagggataaaatgaatgcagttagaaacagcagaacttgaaaaaggtctagttagaaccttagtggatgttattggtcacagattagctcgtgataaaaataatagaccaaacgtaattagagcttacccttctgataactcaaatgacaaaggtttaaaacctgaccagccatttattaccgtatattgtcaagatgctgcaacaccttatggttgggttcttgataagtttgttgaagatgatgtagtttgttacagaattgcttttcagattcctgtattaattacggtaaatgggaaaggtgctcacagtattatgcttgagcttaaacaacgattagagatgagttcagtcagggatttaattcttgaagagacaggagctacagtgctagacactggagccatcccaaatgactacacttatctcaatacagatttcgaaaattctgcgcctcttgttgtaactcttgtaaaaaattcagtcctgaaagatgaacgcggaagtattattgagcgtgtcattgttgatggcgagttggtttatgaagaaggacaagagccaccagaatatactatccatctagatgtagactccaaaggggtaaaataaatgtggaatccaattgttaatgtagatattacattgaacaccgcaggaactacaagagaaggttttggtttgccactattcttagcttcaacagataactttgaagaaagagtgcgtggttatacttccttaactgaagttgctgaagatttcgatgagaatactgctgcatataaggctgctaaacaactttggagtcagactcctaaagtaactcagctttatattggtagatgcgctatgcagtacactgtatcaattcctgatgaggttactgagagcacggactactcaattactgtagctgtcggtgggggaatgtcacaaccattccagtacacctcacaaggtgaagatactgccgagaatgtattacaacagtttaaaacacagattgaagctgaccaatcaattaaagataaagtttcagtcaatgttactggtagcaacggttctgccacaatggtcatctccaaagctggtgacaatgatttcgtgaaggtaaccactacagcacaaactgtgtctattgcaagcacaactgctgatacagcgtcaactgctctggcagctattgaagcttattctaccgactggtatttcattgcagcagaagacagaactcaacagtttgttttggcaatggcttctgagattcaggctcgtaagaaaatcttcttcacagctaactctgatgtagcagcactgcaaggtacagaattaaatagtgcaaatgatgttccagcacagcttgctaagagtatgtatactcgcacagtttgcttgtggcatcacacagcggcagaagattatccagagatggcatatattgcttatggcgctccatacgatgcagggtcaattgcttggggtaatgctcagttgactggtgtagctgcttctttacagccagctaataagagacctctgacaagcattcagaagtcagctttagatgtacgtcactgtaactttatcgaccttgatggtggtgttccagtggttcgtagagggattacttctggtggggaatggattgatatcgtccgtggtgttgactggttagaatcagacctgaaaacttctctgagagacttgctaattaaccagaagggtggtaagattacttatgatgatactggtattacccgtattcgtcaagtcattgaaacctctctacaaagagcagtcaacagaaacttcctgtcatcttacacagttaatgttcctaaagcctctcaagttgctttggcagacaagaaagctcgtatcctgaaagatgttaccttcgcaggtatcttagcaggggctatcttggatgttgacttgaaaggtacagtggcttacgaataatagaggtaaattggaatggctatgtatcagcaatattcccctaaagacgttgtatgtagctggaatggtattgccattgaaggctttgccccagactcatttttacgtctacagagaacatcaccacttatcacaccagttgtaggtgcaggtggtcaggttgctctgacaagaaatgcagacaagacaggtactattgagattgagctaatgcagacttctctctctaaccagatgctttctgcaattcaagctaaacaagacaacatggaacttgaagaagatatctcttctaacttcgtaatctacgacccatcaggctctgttctggcaactggtattaatgcttggttgcaggaattaccacagattgaacttgggcgtgaccagaactctaaaacttggatttttggttgtgagaagctagactacacttctacaattccagcgtcaagtgtttaataaatcctataagggggagactttaaaaggtcttccccttttttgtttcttttaaaagtattaaggaatcacaatgaaaacagaatctagagtaattaatggtaagaaagtaaatattgttctgcttggggcaagagatgggattaagatgtctatgaagctgggtaaaattgttgttccaacatttgcacagatgctatcaagtctgactgataaagataagaaagaagctccaatggttccatttaaagaccttgttgaagcttgttttgacagaattgaagaaattaaccttgaagaaatggctaccctgttatttcaaggggcaactgttgatgacttcccactcaatattgatacatacttccaagcaaactacggtgagtttattgattacttagcatttgcgctggaggcaaacttcggaagttttttcgaagcaagcattttcaaaagcctaacttctcagtaaacatgggtaatactctacagacaccactaactgatgctgctgtagaggcaacctatgaagaagcagacgagatgaaatttgtgcttgctatttatggtatggaagggtgtaaagaaacacttgaccaactctttgctatgacattctctgatttattatcattgagacaatttcttgaaattcagaggtcgtataaagaggaaattgcttacaacgaacttagaagagcaggaaaaatgtaatggcacaatatacagttgatagcttcattgtggaacttggtttcagtgaaaaggttgttaagggcttgcaaagagttgagaaaatgtctatgcaagctgctcagcgtattgagcgaaatatcaataaagcctttgatgtgaaacctaataaaagttctcaggaagcacttaatagaattgtaaaaaatgctcagtctgcttcgggcagaatcaataaagcactcaacagttccttgaaccttgattcacaaggtgttaaatctcttaagaaacttgaaactcaggcaaaaaagactgcaaaaggtattaacaagtcattaagagatgctatgaaggttgacggtaaaatcactatcaagacagggagagggagaggtggacagagtatccctcctgttggtggtggagcacccagaggtccgagagtagatgttgctcagagacaaatggaaagaatgtttaacaacaacttctattcagggttaacccgtagactggaaacaatcggtggtcaaggtaaccaaatggcagcctctttcagaggaagcttgcaaaatatctataacagatataaaggtactggtaaggttggtgagtatgagatggaagttaaaaagctcatcgacgtaaccaaacgttgggttattgcagaaaatgctagactaaaatcagttaaagaatcagcttggctacaggatagagctaacgcatcattacgtcaattagttggtggatttgtttcagcttatgctttactggaactctcacaaaaaactattgaagctggtgtaaaaagacaatctgcacaattagcctctacagctatctttggagcagacactcagcaagctagaatgttcgctgcatcattcgcacaccaaattggtcagaactacacagataccatgaagcagtactcaaactttgctgctggtgctcaaccaacacttggctttcagggtactcaagagttctataagaatgctgcaatgtttgcccgtatcaggggtgctactgatgaagacttgaaaggtatcatggttgcattccagcagatggcgtcaaaaggtaaagttcaggctgaagaacttcgtggacagttaggtgaccgtttagcaggtgctgtgcagctattcgctgatgctattggtaagaccccacaagaacttgataagatgatgcaagacggtaaacttcttgctcaagacgttcttcctaaagtatctgaaagaatggctgaacttgtcaagcaagcaggtggtatgaatgctgtgtccaagcagactgctacatcaatgggtcaagcgaaggctatgtgggataacacacttgtagcactgtttaacaattctagtgagggcatttcacagttatctaactccgttgcaatgttcttgcaaggttctatgggtagcacgcaggctttaggtcttgtgattgggaacctgttaaaaggcgctagtaatctacttgacttcattacagacttcatgtacagaacatctgcactatactactatgcaagagcttggtataaagaccttgacaacagccagcaaaagcttatcaaaagtgctggtgaatttctaggaacagttgtcacaattggaggcgcagttgctgtagtatcaaaagcagtcaagctcctaagtggtttggttggtggtggtatctttggtaaaatcttacaaagacttggtgttagtgcagcaggtacagcagcagccggagaagcagccgcagcagcaggtggagttacagcaacgagaatggcacttggtactgttggttcagcattaatgctaagaggctctacagacccaaatgctgctaaaaactacagtgaagttacattaccaaaaccatttgaaaatgctgttgcaaatattacaaacccaaaaaggccaatgttctttgatgagaatggtcaacttcagtttgcacagtacactcaagacgttgaaggcaacagaaagttaattgataatggtctatctaattgggagattatcatggagaagctatcaacatctattgataattttgccaataagtttaaccagacaccaatgatgatgacaccttctggtttacctatgcagactaaacaaaccctgaatgttactttcaatcttgatggtaaacaaattgctactaagatggtggatattactgacaagaatcaagaagacattcttctaagttcaagctatccagaggaagaataatgttatgggattctaatatgcaaatcaaatatagtggcaaagacggcatctatttccacttaagagataatgtagatgccttcttaaccttatcagcaactgaaaatatggaatttgacagccctatgcaggtaactacacagaacatgcaatcagggcaaaccgtcacagataatgtgcaaagagcacccagaacaatcactattagtggtgtcgttgtagttggctatgaaggaagcttattattaactcgtcagggtcaattagtagaaaacttcatcgacactcttgaaagctggcgtgaccagaagcaaattatttcagtcatctgtaaagacggaattaaaattgatgattccattatcacaagttttaaagcctctaaagatgttggtatttcaaatggtctaagaatccagctaacttttcaggaaattaactttaaagctatcgtgggacaaactgatatttctgctgcaactggaaagaccgctaccacgaatgatggtggtgctaccagtaaaaagaatacagggaataccacaacaagtctaggtaatgggaaattaaactgtcagttattattcgaccttgatgccaatggagtaagggaacttactagtgctgaagataatgcccttgcaaaatgttccatgtctgcaaaaaccagaaaaggtgttactacattcagtgaagaggctgagaaaaatgccggagcagcattaaacagaactgctggagatggaaaagcattacaaaagcattcagtgaatccgaataaaaaggggacttattaatgtcacaatatattcctgttcctgatacaggatggtctacacaaactgtaactctggatggcactgtctttgtaattgaattaaagtataaagagaggcttgacagatggttcttgacgctatctgatgttgatggtaatgtattattatctgaaaagaaatgccttgcagaccaatcaatcacaggacgctatgtaattccttcattagctggagagctttttgttgaacgaatgtatggtactgatttacagcctaccagaaataacttcggaagagaaaaggcatttgagcttaattattacactcaagaagatatgagattaatggagaacttgtaatgtctgtaaaagatagcactgctggggcttcttttaggtgctatcaattggctgtaggtagtgaaactacagcctttaatgataaacctacaagccatgctaaagattctatgcaaatggactattttgacaacttacaatttacttgtaatgtgtcttatacgtctcagaagaataaagtaacctctgatgataccacttttgaaatctacaaccttaataaagagatgagagccaaattcaaaaccgttggtgcaacagttatgcttagagcaggttacactactggttttaaaagggacgcaaatggcgaccttattattgaatatgataacctcccattaatctatctaggcactattgaatatgcttatacatataagcgtggtgttgatatgattacaaaggttatctgttccaatgataaaatggaaagaaccacgattaagacatcaatttcttataaagcagggacaacgcgtaaaagtgtgattagagatttagtcaacagactaggtttctcacttattgatgaagacctttcaagtattgatagttacacttacaagaatggttttagtgtttggggaagtgttgcagaggcacttacaaaggtttgtgaagaaagtagtctacgttggtatacatttaacaagcaaatccgagtagttccttttaacgctaaggctagacaactttcttgggaaatttacccatataacgttattgattctttgcaaggctactacagaagaactagaaaggttctgaaaaaagagaataagacagttattaaagttaaaactggagttcgttgcaaaatccatttagatgggagaattaagatgggtgataacatcactattagggaaagtgaagattttgaaggtcagtatcgagtaaaaggtctttctcacaatcttgactttactggtggtgcttggacaactgaactagatttagagaaggtggaataatgaagtcaccagttactagaatgtctgggtatgtttcagaatgtcttgatgaatttagaaaagaactgtatactggattaccagccattattcagtctttcgattcaaagactcaaacagccactgttaagccactttactctattaacggtttacctatgccagagattactggtgtacctgttcaatttccaagtggtggtggggcatctttaacattccccgtaaaaactaatgacagatgctggttagctttctcaatgttacctttagatgacttcgttgtcaatgacaagaatgttcagatggaaacaaacatgagaaggacacatgatatttcagactgtgtagctttcgtaggcatctgcacaagaacacagaattttaaaccagacccaacagcagttagacttcatttcggtgactctgtgttaagagttactgatgatggtaacttctactttgaaggtgatgtacacatttctaaaaacttgtacgtaacagaagaagtacacggctcagattttatcagtgacacgactggtgtgagctttaatgaacacacgcaccattattactggacagaccctgctggtgaggctgatactacagaggcacaataatgaaaacagactttgcattaaatctaggtggtgactatgttgccactttaggttcagattcagtgtatgtggctcatggagatttaaagattactggtaaccaaattagaattatcccagaagatgataaagctactcaggttgctcaaagacttcatattagatgccttttaagggctggtgaagttttctttaatacatctgctgggttcccatatttacaacttgccaaatttaaacagaaaacttctatctttgataattacatgaaagcctaccttgttgaaacaagagatgtatctaacatctataactattcttcttcaatggataatgctcagagaaaagtaactgttaattttgatgcaactactacaacagatattttaacagacattacgcaagaggttaatatctaatggcaggattaactacaacaggattacaaactctaagatatcaggaaatttttgataatatcaaatcaaggcttcttagagatatttcaccaaaccttgacgtttctgaggatagtcagttaggtctctttctagcttcaattgcaaggtctttagcagacactcatgaaattctatcagaaatctatgatggtggaacgattgataaagctgaaggttttaaccttgatgatattacagctttaaacgctgtgtatagatatgttgctcaagctacaaggggtcaagtagagtttactggaacaacaggtgcaacaattccgtctacaaccagattaagaagtactgctgggaatatcttctatccagtttcaaacattacattaaccccttcatactgtgttgaggctattcttgaagttaactctttacgaactgatgcaaattatgttattattattgataacgttattttctcttatcagccaaaatcttcagacacaatcacagtactattaactgagcttgctaatgcaattaatggtggtattgtagcaaaagctgaagtcatcaatgatggttcagcattacgagtttataaagatgaaggcgacattattgcaagaaccaaccctatggtagtgactgctaccacattcctcacattcacaaaaattacaactatccatgatgttgttgctgaggaagttggtgcaattcctgcattagctgggacacttatcgaaattgaaacaactgtagatggtcttgatagcgtatataaccgttatggcctgacaacaggtagaaatgaagagaccgatacagaacttcgtcagagatatttagaatccctgtcagttactggtgtaggtactctggatgcaatcgtagctgctgttaagagggttcagggcgtatcagatgcttcaggtgttgaaaatgatactgaagagacaagctcagaaggactcccaccaaaatctttcaagattgttgtagttggtggtcaaaatgataatgttgctcaagcaatctgggacactaaacctgctggtattagagcttatggggctatctttgggacagcttatgacttaggtggactatctcataatatttacttcagtaggccaacacctaagtatgcttttgtaaaagtatcatactctctatataatgaagaaagcttgacaattccagaagaagatatcagagacagtattattcaaggtattaacgcttatggtagaactttgaaagttggtaatgatgttatccctaatagaatctatgggtatatttataatgtcattaaaggtatcgagattaatgaaatcaaagtagcactatccaatagccagtcagtaccacctagtgatggacagtacactacagcaagaattactgttgatggtgaccaatacactgtatgggaaagtagcaagtacaccattactaaggagtgataatgtttcagaaaattgatgatgtttattacaagactcttgatgaaaggactgttacacagtttaaagagaaattcatctatacgagtttgctgaaagctatcactgatgagctacaaacattggaagatgtttcatggcagatgcacactgaaaggaatatcaggaaggctattggacagcaacttgacaacatcggtgcattaattaaagtaccacgaccacttggtgctgatgatgaaacatatagagcaattctttatattcagatttttctaagacgttctgatacaaccccaacatttttacagaatgctatcatgactctgtatgatgcaacattttcacagctttttgaacatattacacctatgactgctggtattgtggttagagttaacacaagaaataacgttgttgacacagcatacacattagcaaaaattgctgcaacaactattggttcagcagtcattctaagagatgtaaccctgaatggtactgcttggacacctgtagaggttgctgactctgctttagcaattgttgatgataaagataactggcttgttacagatgctaacaagggtctggttaccaacaatacaggaggttctttagagaagaacttactagggagtttagcagatgctggtgtaagagatgcttatttcaagattgatagaacggctaatagtggctcagtagattacttgaaggttaataaaaattataatgctacagacaactacatcgttggtaaagaaactgtagcaggtggtgattatggtgttatggctgaagtagctcaaatcatcaaaggtagaaaagataaatcacagcaagaaggaagttcttaatggcatttttaaattggtctacagatgaagtagatgctgatggtaaccagctaaaagtattaccaccaccagaaattcaggcgactggtttattaagaggtgaaccaatgggtcgccaatggtttaattatatcttaaactatctcctgaagaaagcaaatggtactgttggtgaggtaaggtcttttgccactgcgcaaccagatttggtggctaatggctggaagcttattaagaccgaaacaggtactgcatcaacaagtacaaaaaatctttatacttatgaatttgtaggagcttaataatggcagtaggtgaaattcaaattagtgccttgcctcaagcatccttaccaattgaccttagtgatatcttccatcttaagcagggtattgaggataagaggtgtactcttgagcaattacttgctccacacgcaagcctaagaaataaccctcatggtgttactaaaacacaaattggtttagataatgttattaatgctcttcagttagtcgctgcaaataacttatcagatattgttaatgtagctgaggcaagagcaaatctacagattatgtcttcagaagaggttaataaccttgtccagcaacatatcaaggacaagagtaacccacacaatacaactaaggcacaggttggtttaagtaatgttcagaactggacaacatctaatctgtataacgaagatgcagataagtatgctacagcaagagcagtaaataacttgtacaaggctgttcaggcttcttatccagtaggtactatccatctttctatgaactctgcaaacccttccacatacttaatttgtggaggtacttgggagttagtttcaaaaggcagggcattggttggctatgactctgatacaagaccagcaggttctgtatttggcgcttcaactgtcactttgtcagttaataacatgcctcagcactcccactctgtgtctcttagcggtggtggtcacactcataatgcaactgtgtcaatttcagcttttgattatgggactaagactacaaactcttttgactatgggacaaaagctactaacacaactggtaaccatacacacagtgtgtcaggtaacactagcaccaatggtactcacaaccatgatgtgtatcctagagaaaatgatggcactggtaatgctgtggctgactctgatggtggtggtgcaagaaggacatcaaggacttctagtgatggtgcgcactcacacagctttaacgtcacatctggtgcatcaggtgaccacagccacacggttggtattggtgctcacagtcatacagttggtattggttcacatacgcatagtggcactgtaacagtttcttcttctgaacatacacatagtggcaatacaaatagtgttggtggaggtcaggcagttaatattgaacagccatccttcgtactgtatgtatggcagagaacagcttaatttctttacaggggctttatagccccttttaagaggaaaatttataatggcagattacaaattgagtgagctaaactcaatcgacacaatccgttcagatgaccttcttcatgtcagagttaaaaagagacctaaaatgctgggtgatgaagaccgtcgaatgacctatcaagatttcttagcatcttttaagcttgaaagatttgttcagattgctggtagcactatgacgggtgacttaggaattgttaagctactttacggtggcaaggctgtattcgaccccacaggctcttctgagattactgttggtgatgttttaaagacttttaaaatcaacgcaaacggccttaaactaactattgcagacgcttcaaggtcggcaactgtttatcatactttgaataagccaagccctaatgaacttgggatgagaactaatgaagagaatgacgcaaggtatgcaagactagccgtgaataatacctttagaggtactcaagctatcctctctgacaatgaagcgctcattattaaaaatatcactcaaggtgctccactctatcttcgtggtcaagatgcagatggtactaacagatggtatctaggtaatgataataggggtacaaataatcttgtattgaagaatgtaaagtctgacgtttcaattgctattttagagaatttggtgacagtcaacaaaacagtcagaatcactggacaggtgcaaccttctgattggactaatattgattctcgatacattccagcagctactttgagtaatcttgctaaactaagtgatgtaaacactttcaggtctgcacagattattaatcaaaatggcttattgttacagctaaagaatactacacaagatagccagttatactttgctggctttaatgctgataatgttagaaggtggtacatcggtaacggggaacaaaaaccagaaagtttcgttatccacaatgataggactgctactaccattttcatggtgaatgacttcttactgaacaaaacagtcagaatcactggacaggtgcaaccttctgacttctctaacttagatgctagatactatacccaatctgccgcaaacgcaagatatatgcttgcaagcatcactggttcggcttctgaagcagatggtggtgatggtgttgcatgggatgcaaaaacaggtctttataaggttactaacaccactggacagtcttcttcacttgtatatcacatgtttttagggactggttctacaccatctgcacaattaaagttttcgtttaaaaatggtgggatgtggtatagaacatcaagagatgcctatggcttcgaagttaattggtctaaagtttacacggaagcacaaaaaccaaccccttcagagattggtgcatacactaaagctgaaactgaccagaaaattgcaacagcaattagtgactctacagaccttaataaaatctatccagtaggtattgtaacgtggtttaacagtaatgttgaccctaatacagcacttcctgggttaacttggacgtacctgaacaatggtgttggtagaactatcagaattgcagcagcaaacggttcagatgttgctacaactggtggttcagattctgtgacgttgtctgttggtaacttgccatcacacactcatagtttctctgctaccacttcatcttttgattatggtacgaagggaactaacagtactggtggtcattctcactctgtaagtggtacaacaagtgctgctggcaaccacgctcaccacttaggtctgttattagttaatggtggtgatgctcagtatggttacacaactgttagcaacagcaagacaagaactcttgactggcttgatagaagagataacaagttccctaacactaacacaactggtaaccatacacacacgtggtctggtactacaagcggtgctggtgaccattcccactctgtaggtattggtgctcatagccacacagttagtggtaacactggtagcacaggttctggttcggcatttagtgttactaaccagttctacaagttaatggcttgggtaagaactgcttaatcccttgttgactgattgttaagatggtgttaatattctttatgggtattctcaccatcttggctgatgaggtgattaaatgcctacaatcctagcaattcttctaaaaaatctaggtagcttcttctggaaactcattttatcccttctaagtgaatacatgattgagaaagtgttctttaagcttgcaagataccttgcgagtaaaacagacacacctattgatgatgagttcgtagataacttagaaaaagcttttaagggggagaaataaatgaagtggctagaggaagcttttaaaaataatattggtgcaattgtagttggtatttttagtgttattgggatgtttaccacgatgcaggtttcaagtggtaaacaagaagtgtctgtcacaacaaagttacagcagctagataattattccaaaagtaactattcagctattcgtgatttacagtctgacatgagactgattcagctagggatggagaaccagaaagttcagttagagaacgttaagggtgagaatgcaaaacttaccaaaactcttgataaattctctgacagtgtgaataatctggctcaatcagtatcagccttgcaagctattactgaaaagaacacaaagaatactgaaaaataaagtttaaggctcctttttacgggagccttttttgttttacttgcctactgacagaggtgcttcaatcttccctgcatgttggtagttgttaattccaccaataaagtcacttgcagtaagatgttttaagtcacttaaagtgttaagctgtacaccaatctcaaaagtaggtgcatggaactcttcattgttcatcagttcataaacctgcttcatatggttctgataaatctgagtatctccaaagacacctatcaagtaccgtggagtgtatccagtcatcttacaaagaacttccagaataaaaccataagacgcaatattaaatggaagccctaaaaaggtgtctacagaacgctgataccattgcaagtcaacttcaccttcgttggtgatataaatctgaaacagaacatgacaaggtgctaaagccattgagtttgctgcaatatctgctgcattccaagcattaacaagcatgtaacggtctgtgatatcacctttcatcttcgttactaaggtttctaactggtctacaacacaaccattatgaccttcaaagcttctccactgaaccccgtagattctcccacctgcatcttctaaccagtcttgctcagaagaatagttagagcttaaccaacgtttaaaatcatctgaccagatagtccaacgttctccatcattttcaccccaagtgcgataacggagttcaccaagtttattctcaccattcaggaaccataaagcttccccaatgacttgccgtgtaaacacctgtttagatgttaagagcgggaaaccagttcgcatatcaaaacgaaactgaggtggagcaaatgcagagataacatctccagttcgtgtagtacgcagttcaccaacggataaaacatggttcaggatatttttgtaacttgaatctgcttgtgacatatcaaaagtgtccttttacttgtggaacataaatttcaaaagttgctttaccatcctctgatggttttgactgtacctttgtaaatacacggttatcatacagcttctcaaagaagttttcaaaaggtaaatgcacagtggcctcttcagtaactttatggaagactgtatggaacaccacaccagcatacggtaaagcattgacaaggacacctgcaccaccaattacaaagacatcttcatcaatagagctatcaagatacttcaaaaatgctccaaatgactctttactggctttagcatacattacatcatctttgccaaagtctatgcctaagtatggtacagaatttgttaagattaggcttgcacgttctggtagaggtttactacccagagtcttaaaagtctcattacccatgactactaagttatttttagtgagtctcttaaactcttgcatgtcctgtttatgtcgaggccacggcataccagttggagtaccaaactcaccattttcaccacttgcaaagattaatttaatcattttgtaaatcctttcttaatgaaccagttgataacactcttcacaactttactacgatggtagataaaatgtggagagggttggtatgaaccataagcccagaaagcgataatttcattacaccctgtgcatcgggtactttcttcagcaatatgaccgttgactatttcacttacctcaccttgtaagtctgtacacccgcaatgtggacaacggataggtgttccatcagactcatagcagtgttcaattttcatctatttaacctcaaaaactggttcaagaaccaatataaagtctacacagtcatcttcttcatccagaataccatcaaagttcttaggtacaaagtcgaagaggctcatagaatatcggtcagaagtaaccctgatagtgttccctatattctctacagttaatattgtacggctttctgttacctcacttagaagattactcacaaagtcatctaagaagtgtttcatcagtgacttgaagcctttagggtaatctgtaccagagtatgtttcaatctgaggaacaagcttaacatttatactagtctttgttaagaacgttttagagaacatgctatcaggtagcttacaaacagtctttccagtaccttcatgttcaatctcaacaaaaccagcttcatcgccacatgtaactattttaaaagatgcttcattctcatactgtgaagccataaactttttaagcatcgttttaaggaaatctgcatgggcatcttgtaagaatatatcaatcatagttaatcacctattatgggaacagacacttgatgtcatcgtttttgaaaacaaaacttgtgtagttatgaccatcaacatccagccaaacagcctgaacatctacaccatcaagattgtggtaaagctctttgatgaagtggtctttcacaatctgactgctagttgtttccagcttaatgttcgagattgctgaacctacagccatatagcccatgacacgtttcttctcagtatgcttaatcttaccatctttgtaagccataatgagattggagagaatcttcacaccataatatttttcaaggtgagtaggtacgccataaaagcctaatgcgaagttttcagagtggataatgttttcacgtttcatattaatctgccaaccttaaattgaaattaacaccaaatttttcacatacttccaacatatactcaagggagacgttaccagtgagatggattatgttggatacacgagcctgagagataccacaaattttagcaacttgctcttgagaaagacctctggatttaatctctctcttaaaacgatgtgcaacgaagtctctcatttcgtctacatccattggacaaatataactctccatttcagcctctctatcagcctcccaatcatcttgtggggcataagggtcaaaaacctcattcatctttcttcttccgtttgcgtgaagtgtcaattaatgagtctatgtttgtagccctaaccttttcacgttcatcgttaagataatcgtcaagagccttttcaatctgtgaatcatcttgacagataactgtaaagactgtaaagccgtctgtatcgtcaattatcttaccataaccgcttctgggatgtaactttttaagagccatatcaaatacctgtgcagcttctgttttctaagaaatactcaacaccatacatagctttttgcatcaaatcttctttaaactggatacgatgattgagcatagcctgtacatcaatatcatcagggtgcttctctttaatatttgcagattgcaggaaatactctgcaagaacacgatactgatagtcagttaccttatcagtcatctctgttaaagactcttcagagattggtttaagtagttcacctttagatagggcaacacctttaacaatctgacaagtgtcttctggaacacctgataagtccacatttggaagttctgttgcattgactggtaaattcattgccataaccattgcagcagctaataaaatctttttcataatgacctcaaagttatattgaattttgtattacatttagtataaaaataagctataacacctgacttgtcaacagattttatagcttattttggcagattttttataaggctactgccatccttccataccttaccttaccacacctaaccatacctaaccaaactacaccatacaataccttgttaaaagaccctcttaaagaccttttaaaaaggagcctccgaagaggctacctagtcaacttagaaaggttttctgcgttgcttgttaatgttagctttcatagcagctaagtggttttgctgttcaattagtcgtgaacgttcttggtggctaagtgccatagtgttcacattctcaattgcttgagtagcttgctttaaagcacgaccaattttaccagacattttacgttttgcaatagttgcttgatgcttaggttcaaccacacgataaccaacacccattgaagcaaccagataaatcttctcttctttaagaagcttctcaataaacttctcaagtcggtttagacgtgtaagagcataagccttcatttcatcttcgtacttaacaatgtcaccttgataagttggcttcacaatacctaagaaggtgtccatctcagagtgtgatacagtgtcaccataactaaactttgctgctaatgcttttgtattcataattaaacgttaccttctgaaataacttctacagaaaaacgaccaaagcgtggacgccaatcacctacaccacaaaggttgccagcattttccagaaccatcaggagttcttctttggtgatttgctcttcatcgaacatcaaaccaaactctacagaccagtcacggaagattggacggtagctcataactcgtgctgtgccaatcttaacagatttagcatagataaagtctggattcttagcaagttcttgtgggtttgctgggcagttcttgatagtcattgggaagactacatctgtcagcataatggctcggtcaatcaccttaccaagtttgttgagttttgcaccagacttgatacaagcctcaatcatctcaccgttcataacaaaacctagctgctcatcgtagtaacaagaggttaccagttgactttctgctaagagcgcatagtcttcgtcagtctttttacgtttactagacagagacttgtgatattttgtcagagggtttaatgggtctgacagtgtatcagcgtggctcaggaaagggcgagtaccagtgattttgatatttaacagtttcatagcatttagctccacactttagttgattgttaagttgtttgtaaagaaccctcaacagaagactctttagaaacttggtagatttttaacgtggctactaccatccacccataccttacctaaccaaaccgaacctcacacaaccagaccgagccgcaccccgccttattaaaagaccctcttcaaagaccttttaaaaaggtaagtctcattttaatgtagctgagactaactacccatactgtaccgcacctgacccgacctgaccagaccagacctaacattaccgtgccacaccgtaccgaacagaacactgccatacctcacatcacttaaaaaccctcttagaagactcttaagtgatgctggtgagtacccgttggtttatgctgctcagtatactcaccaaattttctatgtcaacaactttttatataaaagtcctgatagctatatgtgttacaaaacagaagattgtgaacaaaacacccattgcaaaagatgtgtccaaaagcttacttgcaatgtatgacaatacaaagacaaccagtataaacagaatgactgcactgaacatagtttactcataatccctaatagctagcccgacagggaactgtaaagaacccttacgagtcatcttctggaactgaaccgttaaaggcttcccgataaactcttcaggatgctcagcaagatactgtttcttctcatgagtagtcttccatgagacatctacaaagacgttaggaagagtctctacaacgaacttgccatgaccacgcttatcagtctttacaccagtcactttaaactcttcagtgtgcatcttcttgtgcttaatcaagaagtatgaacggtgacaacactcatagaaggagtcttcagagattgaacggtacattgcaccttcaaacttagcttcaacccacttatcgtgagcttcatcaaactcttcccaagaatttacacgacgagacttaacaggaacaactttacagccgtctctaaagtcattcaatggtgaagtctcaataatatctctacgctcaggccacgtcttagtactgtcacagatatcgtaccagtaaaacttgagcaagtgtctgtcaggattgtcttcatttttaatcatggagacgatatcttctaagtcccacccatgagcataaatctctccatcaaattcatcaacatctttgtggagccttaacattgccataatgtcaggtattagttcagtagggattttgtaaacagtattctcacgagaatatgctgtaaatacactgccaatactcaagtgccttgaaatcctacaacggacaccatcaagtttcggttgagcatcagcagggaacttcagatactttgcatggctaacctttgcagcatcatgagcaagctgtacacctaccttctcagtattctgtgcagaatcttttgtgtaagcataacctttgcggtcaacttgctttttatacttagcagcaacttcaaagagagcttgctgttcagcattacgctcattctttttaccgatgttcttaggctctgctgtgtactcttcaaacatcatcttgccattttctttaccataggttgtgataactttgtcacctacagcaacacatgaccagacgttgaaggaaccatctttattttgtttgtacagaattgtcatttttaacctctgagtgataccaagtgttgcaggcattacatgcgtaaagctctaagtcgtttttatctggtttatggaaacagtttgacccacaacgacaccggaataacttaccatcaacacgaagaatgaatgtttcaagctcaccatcttctgtaagaactgcgttctgaaatttattatctttacccatttgtactctcgcctgtgtcagattttatataagacctctcactacgtcttttaatgaaatgtacaacgcattttggtgtattttttacatctttaatgtgcaacctttcgaaactgtgtactgtgaagattgcatctgtcattgtttgcttagatttcattttctcttaccaccaatttccacgtcgataacttgaacatcaccagcaacatcaaacttatgaatgatgctttccacagtgtaagtccaaccctcaatgcgaaccaattcaccttctcgcggtacgattgggttacgttgggccacggttgcagtggaataaacaacatcgtagcagtagatatagtgtactaaaacttgcatattagtctcatccatcaataacagtagtgtgtgattgaccatttttgccatatctataagatgttgttgtttgagagtttgggcatctgacaacaacaatatccctgcttatagcatccccattgagtttgtagattttgcagtcttgcatctctggagggaggctgtaagaggcatctttgttttcataagatgggttacagccagccagaaaaattactccaagtgcaaccattgctttcacacaactcttaaccttattgttcacgataatctacctctctgtatgtttttaaatagtgagtgatgagttctggtaattcactacgtttaacgtttgaacgaagaagtgtccagtcaaaacctttaccaaccctcccccagagactgtacattttcttcatagcaactccagaatatcaatacgttcacctttgagtactccagtacggtcttttgcaatcttcccttcaacaataagaatgtgtgcagaccttaaagtgtcactgttaaaggcttttacgaacttgctaggcatcactacaatacacatctcctgaatcaactctggagtatagcagttgtcgtgaagttgctgaataacgtctgcaagtgtcatttttgatgcctccaatactcaatatcaataagttcttgtgcaatgcttttaaggttacctttcaagaaaaccttctcagaacctgaaagagatgaattgtcaattaacctgttcatcctctcaaacaacttctgcttacgattcttgatagtctcttttgaagcacctttcatcatcgctgcatgggttcttccacggtggctcataagccctcctatataagatatagtataaggtactcttccatgagcaccttgtcaacttagttttgcaaactctccgtggagtttaatagcagcttcacagtaagctttatgggcttcttcaggtgtgtcaaacataccaagatgatagtttttaccttgtaaacgtatcattgctcgaaaccttttacttatcttctgtacaccttttggcaacccagatggggactctcttgaccgattgcaagagttttgtgaagctgtacaaacccttaaattcaagtacctattgtcccaaccgtctccattcttatggtcaacctgtaaggttttatcaggtagatatccatccatatacaagataactaaacgatttgcttggtaaccccttccatcaatcagcaactgaactgacttgtgtccatcagtatttgttctgtagtttccagccctcttacctccaaatctagagttaaagtttgcattaccttctctaaacttccaagtaaagacccctgtttcggggtcgtagtccaatagctccttaagacgaatttctgtaatcatttcaacaccatcaatgtacttccaaccagctcttaccaaccttgcctgtgccagttacaagcgtctcactcttcaaacctaaattcttagatgcctgaccatacatccagtcagttatggctttaacttcttgagtcatactttctgggcattcccaactgttttcatcgtggtatgccagcaaaagcctagcaccaattgctggttttcgtccatttaattttgtcaacccttcttcacatgctcttctacaagcaaggttaattgcctcattttgaatctgagcctctgaacccatgagcaaataattcaacagcttatgcggagatttacaccacaaccaagctccagcaacctttacaaaaccccctttagagattgcagcagtcttaccaaacacctcttcaagtgcctttttagttgctttgtagtcagcttccaagtcatctagcagctttttaattttaggcaaacgaataaagtaagtctgtttagtcagcgcaccttcctgagtagttgcagctttaatcgtcttagcaaacttctcatcacctgcaccgaacagcagtgcatagataccattcttagctttcttacgacccttgctaatctcatgaagaagattctcatcctgagtagctcgacaagtcaagatgtcctgctcatcgttcaagttaaagtaaatactgttcagtgtatgtgcatcagtccctgaatagacaacgtacaggtcattctcagagtcatagcgaaggtacttatcaatctctgggttgaggtactcatcaaagtgtttacagtaatagcgtccatcttcttgacgaatgaactcaatttcttctttaccttgcgttaccgctttggtgaagtctttatcacccataaagttacaaagaagaactagctgggctgagttcatgtctacagagacaacgttagtaccttcctcacaaatccacactgccctcattggttccccatagacagcagcaccagacggtacgtttacaataccatactgtgtcatacgtccagttgaagtaccaaacaccattgcaccagcactaaggcgaccatcaggacgaatctggttcaaccaacctttttcatcatcctttgagttctcaatagttctgcgtcggtgcatcaaagtgtagtatttagcaatcttctgtccaagctcaccttcaatcgtatcgtaagatgattcagtaagttttggtgaagtacggattaagcaaggctcaagcaaatctgtgtacttcttcacagaccagttatgctcaatgtactggacgccttcgtgttcaacataactcaaaccacaccgctcaaccatttcctgccacttaggatgctttgtaatcatctttttattgtctttgaaacgacaaactttgacagggcgaccatcagagtctttcttgtagttccagtcatctggaatccaaccaactgatttcaagtagtctttaacaactgctacctgagtcatacgagaaacttcaaactcaattggtgtatatggtgcatcaatcaaacctgtatagcgacttgactcaagttcaaagtggttaacaacatgactgttgtagtacttcacagttttgactgtttttactggcttccagtctttgcatttcttaccaatctttgcattcaactcgttgcaaattgcacgagcatccttcattgctacaaaaccttccttgtactcttcaccagttacagagttggttggtgtatagcaatttctcttttcaatgttaaaaatctttgtagttggcttaccaaatggcttgatttcatatgtctgcatctcaccgttacgtacctgctgacggtactttgtcttagggtacttggtaattctcttcagtccatctgcatgaccaaatgtttcaacatactcattccaagcttttgcaaactcttctccagtgactttacctttggtcttaatagttggaggtagatgcggttcaacctctgaagcaagctcattagtcaacttgtcaagttcctttacatggaactccataagctctttatcagctttccaaccattgatagcttgttgactcatccagaaagatgtttctttagctcgcatgtaggtttcataagtgtctatgccacacttcttaagcttgagatactcattatcaagtgcccgtttagttttggcgttaatacggatatcttctacaacacgagtgaagatttctgcattccacacaccccaatgttcaatctctggtttacgaacaccaacacgagcaccccatgcagccaagccatgagcacctttataaccctttggagttggtctatccatccactgaacacgagactggataagagaatcctgaaagaaattactccacggcttacactttggattatcaaagttccataaatccggtgcaatgtgattgaaaacccaccagtcataacctagaccattatgaatgcaaagacgttttgcctttaacgcaaactcaataccttcacgtaagccacccttaatgtacttggtatacttgtgaccgaggataggttcatctgtaaagacccatacaggaggctcttcatcatcagatttatagtctgcaaaagccattacgtgaactttagtgaactcaaggagtaaaccatcagtttctgtatcaccaaccaaatgtaagtttttaaaatctacgttttccatttttactccctctaaaatcattaacctcatacattactgcaaaaaattataaaaagcaagttgacaatgcacttgacaaggtgttaatctttgcgaagtgggtttttacttaaaaggttacttaacagtttaactatacagatactttaaaagtcttaaaagattatttaatagcttttaaaaagctttaaagtataacgtatagaatacgttaagataaaagattaaaacttaatagttacttaaaagaggcttacatgcagaaaatgtttgttcacccagacatagctgactttgttagagctttgcaaaagttggaagaacttgacattgctgctcaacgggaatatgctcaccatcacaggagaatggttgatatacaacatgaaatagagttgtctgaaaactatgaagatgacttaaaatgctctgtatttgagcatatgaaagatgttgctacagcgagacgtaaagctaaagacacagttgctttactagattctcttaaaaagaggttgcaaagtggtacagacctgtgtaatctagcgtcactgattaacgatgttgaaacttcttgggataggcactattatccacgttctgaaaagacacttgacttttcttcatccgaaaacttaaaatgttctagaaagaaacttaaccaactgagagagaaataatatgaatatcgatgtagaaaagatgcttgaagagaaaggtattgacgaagcatttttaatcaatgccgtagaaagcatggctatgattcttcgtggtaacaactacacagaacagtttatgcctgcaagctataacttgcctgaagacaagtctgataacggtgcttttgcagaacaggttaacatgatgctttgcgacaaaacacttgctttagcatctatcgttgtaggtgttgatgcccttgcagagttcattttttatgagatgcagaaaaatgattatattgccatgaccactgaagaaaaagacttgctactactcgcaggtaacgatgaactaattgacctgttaatttcatcaactagtgctgttatggctgctcttgagaagcgcatggaagaaaaactttcacgatatgaaaaacttgattggggtgtagaagaattaaacccacgaatcaaagaaattatccagcaaactaaagagtctttggaagaagctgttgaaaatgactctgtagctgatatagaacctcttcaggtgaaagttgcactgatgattccagctatctctacgatgatgaatatcgttgcactaatccaactttcacagatgatgggtgtaagtattgagttcattgaagagatgactggtggcgttagtatgcaagcaatcaatgatgttttggtgaacattggtgcttcaatcattgaagagaaactacgcattaacttcggtgatgattttgtgaagcaaatctcagctatggctgaaaaagagtatgctgagcaactgcactaagtctttataaatcttacaagcctccttagttgggggctttttagtaattaatggagataaaatgagtaatattatcgcatttactggaaaggcacgttctggaaaagacacctcatgttctattgtgaagaacatcttagaggatgagcacggctacaatgttgctgtaatggcctttgcagacaaccttaaactgtctgcatcaaagatatttgacctgacttggaatgacctgtatggtgaaactaaagagactccacaggtatttgacttgtcatatcctgaactgatgtttaaagttacggaagctatggagttcaccttcagagatgaacgttaccatatggacttcaagcttatgtcagagttaaccggacgattaatcatggagcttaagaaggttgctaaaccaactctattgacacgtctggggtttagcaaaaagtataaattctcatcaagacaaattcaacagatttggggcactgaagttgtccgtaaagtaatgggagacaagttctggtctaaagaccttgaaaaaagaatggttagattctatgaaagttgctcacttagaaatcaatatggttttgtcttaatcagtgatttaagatttgactctgaagctgagtggctgagtagatttgcacaccaaactattgaagtaaaaagagacaatgtggataagatttcatcacacgtttcagaaaatgggctatccaccaaatatgagcgtgacattattcataataatggtactcttacagaccttgagaacaagctaagagccatcattaaagtttaaaagagagaatgaagatgagagtaaaagacaattttaaagttattgaccaccgtttagtggaactctcatctctttccaatgaggtaatgattgaacgtcttaagagagttgaatcacgaaggaaagagattgcagatgaaattcatgaactggacaagattgaaaatggattgaaggcagaactacaacgaagaggtgctaatgtctaaaggtcgtaaattgaaagaggctggtcagtttgttggtcattgtgcatgtccacgttgtggttcatcagtggctggttcaatctatcatcatgacgatgattcttattcgatgacttgctttagttgtaacaaaggtttcccagagtgggattttgataaaggacaaatcgtgagcacttattctactggttcagacaataaaaaccgtactttccgtgggatggatttagacgatgtaaaagacaaccttgaagcaatggacttaaaggacaggaagattcctgcaaaagttcttgagcgtttgggtatcaaggttgacattgatagtgacggtgaaattgatgcgcatttctacccaacttacaaacgcaatgaagatggcaagctagagcatgttggctaccgtgttcgtcaccgttacccagaagaccatccaaaagagcacctacgcggtaagttaaaagacttttctggtggtgttggagatattaaaggtgaactggcaatgttcggttcatggattgctccagaaggtggtaaccgcctattcatctgggaaggtgagatggaatgtgcgacagcaatctatatgacttctcttgcgattaaggacaagtctcgtcgtaagaattactgtcacgtatctgttccatcaggtgcaaacatcaagtctatcaaagataactatcagtacattacatcatttgatgaaatttacttgtgctttgataacgatgaagcaggtgctaaagccactaaagaggctgctggtatcctacctattgagaaggttcgtttattccagtatccagaaggtgtaaaagaccttaatgaatggtggacaaagttctataaagagaaagatacagttctggaaggatttaagcagcgtatctacaatgcacctcgttactgccctgctggtatcaagaactttgcagacggttttgaggcaatgaagaatcgtggtcagattccattgattccttttccagaatctttcggagacttgaacaggctaacttacggtggttacggtttaggtgagattacgactattgcagcaccatcttcagtaggtaagtcagcttacactcgtgagatgatttattcagcttggaaagaaactgattataatatcggtgtaattcctgtagaagatacctatgaagagttgatggaaatgctctgtgcaatccacctgagcaaacagatttctgagattccttatgatgaacgggattgggatgaattaaagggagcacacgcagagctttcaaaaggtcgtcgcatccatatcgttgaccatcaaggggcgattgaccaagataacctgctggagtttgttgactatcttgttaacagtttagactgtaagattattattcttgaccctattacattggctctgtcacgttctgatacggatgaagaggaagtcttgtctgaactattgcgtcgttgcaaacgctaccagtatgcacaggtaaacgtttgtcacgttcgtaagagtgcaggtggtcagaaagctaactctgaaggtggagatatctctgaagaggatattaagggttctggtgcgtatttccagatttccatgaacaacattctgttaatgcgtaacaaggttgacccagaccctgttaagaaaaacttgacaaaaatcaagttaactaagtgtcgtcgtcatggtaagtcaacaggtattgctggtcatacttggtacaatccagacacaggacgtcttatcaaagcttctggatgtggtgttgacattgatggtgcagcagaaaatattcgtcaacagtttggtattggtgaagctgaagaccattatgacgactctttacctcattatgaggatgaagtgtttgaccgtgagactggtgaagtctatactgaagaacagcgtcaaagctcaacgattccacctgtattaagtgaggatgcagatgactgcccgtttgaaactgagtgatagttacaaaagagaggggttcatacccttctttgaagaaaaaagtttaaatgaatttcaggaagagtgtttgacaaaggttgataggttctatagaatgctctacatgaaatgtgatggaggcgttgaggtagaagaaaagttccatcacagtatgataacagtcactattactatacctcgacataatattggttggctgtttataattaaagaaaatgtgtttgaatatcaagtatatcggagaatatcatgaaacactctaaagcatttgaacaagtttttggggattccttaaaagccactgctggtaaaccagcaaaatactatgaagagaagcgtgtaagaactggaaaaactgcacgtaaagcagcttctaaagataagcacaacttccagtaattaatgtttgacaatagagtatcaacaaattagaattggtactcttcataaattgagatagaggtttaaataatgtctaaagttgttaaaatgaaagctccggtagagaagtacaatggtactgaacgtcaaactctgcgttaccttctgaaagatgtttggttttattacctgaacacttcaccacgtccgggaaaaggtaaatccattgataagaaattcccaggcaaagactgcaactacagtgtttcaattctggcagaagatggtaacaagctgtttaaagagtttactaagtctaagaaaaacccagaaggttgggataaagttactactgaagcagttgatgcagatgacttcgaagagaagtttggttgtaaaccaccttttgaagcagacacttactacatcttgaaagtaagtcgtgcagcagcttataaagatggtgctgtatggacagctaaacagtcattccctgtaatgctgattgaagaagtaaatggtaagcgtgtagctgttaaacagccgatgaagaaaatcaaagctcaagcatccgataagcatgaagatgacaagaactatgatgtaattcatccagatattgcagttggtaacggttcttttggtagtgtgattctttctactcacttctacacttttgagaacaatgttctgacaaaacctattcaggaacagtttatcattgatactcttgtaccttacactggtggtaacggtgctaacggtgaacctgaactggatgaagacgaactggctatgcttggtcttgatggtgttgaagataatggtgaaatcactgaagaagacgcaacagaccacaaaccttcgaacaattctgatgatggtgacgatgaagacttgccagacccagatgacgaagaagatgaagacttcgatacagaagactaatctctaaaagttactttaaagccctgtacttagtatggggctttttcatatggagagtcacaatggagaagtatacactaacaaaacttcccgattcagttacacatgtctttattgactctgatagcattgcctataaaggtgcttgtgtagttgagaaagcaaaatataaatatgtcaataaactcacagcagaagaatctgaaccatttgataatgcaaaagatgctgcaagatggttagcagaccagagaatccttgtggaagagcttggcctgacatttgatgaagatgaatgggaaagacagacttggaaagaagctaagagtgaaaaagaagctatcatggctactcagcaggttcttcaggaatggcttaaggttgttggtaaagaaagaacttgggtaggctacttaacagagaagggtgtacataaacataaagacattaaaggtcttgagcaccaatatcaaggtaaccgtaaagatgctgtcacaccaacacacttagttgcttgtcgtgaatatcttctgtcaagaccagagttcaagctcttaaagggaggcttcgaagccgattccatcgtaattgctaaagctgaaaagatgggtaagaaggctgctcttatgagtattgacaaagaccttcgacaagctgaagggacttattgtattgatatgacttatgaaaagtcaccactaatttttattgctgataataatgttggtgatatctgggattgtcctatcaaatcaaaaccaaaagctgcaaaaacagttggtgtaggttttaaatttttgtgttatcaggctgttgctggagataatgcagacaactacttcggccttaaaggtgctggcaaagtagctgtgatgaatgctttagatggtaaagagacctataaagagtgtcttgatgctatctatgaactctatgctaaaaaagagtcttacacctatgtgtcatgggatggacagactgttaccaaaacaccattagagttaatggaacaacatttctgggtagcatatcaagagagaaatccaaaagataatttctcttttaagaaatataattgggagccgtgtatgaatgaagattaaaggatttggcaattgccccacctatggtcattgggtatctttgtgtggggaagttgaccccactaaacattttggctttgtctatttagtatactgtaagaaaaccggacaatattatatcggaaagaaacagcttaatagtgtgaccaaaagaaaagttgctggcaagactcggaagaaggtagtcactaaggaaagtgattggatgacttatgagacttcttctgagtatattaaaaaagatattgagagctttggaaaagaattttttgacttttatattattcaaacctaccacacaaaaggtggtctagtttatggtgaagcaaaccttcaacataaattcgatgtaatgacaaaaaggattgactctaagctcagactcttctacaatgccaatattgcagcaattaagtttattactaaagaaacttatgaagatgctgaaaaaagaatccataaggtaatgaaagcaaactgtgcttgataactattgagagagaataaaatgtttaacaaaagtaaagctgtgagtcatgtagcaaaagttgatagcaagattgaagaacttgagcgcattcttgcaaatgccagagagtcaataattaaagaggttgaagctgttgaatctcaaatgcagcacctaatgcttaaacgtcaagagctacgtgagcatctggaatatattgaaacacgagagctaaaggttaacagatattttaaggagtcagaatgtttaactcaagagaatcagtaaaaaactggaatcttcgttgtggaaacactcaaaagcaaccctacagcaatgagtattgggaatctttgaaatctcaatctctatgtatgcttgaagaagcaaaagagcttgtaaaagcaattgaagagaaagaccccattgagacactggatgctcaggcagatttgcaatatgttcttgacggtttgatttacctgtcacaacatgaccataatggtgctatggaagctgtttgccataacaatgacctaaaatacacagacaactatgaagaagctttaaaacgtcttgcagatattgagaagcgtactggtcaagagtgtatcatcagaatgtcagtagttgatggcaaagaatggtatgcaattgttcgtgcagccgatgggaagattatgaagcaatctaatctccctaaagttcagcttggtgaatacattgtagaacttgaaagccaagaactttttgtggtagtatctgagacatgcgttatctgcaaaggtattgtatgtagcttaaaggatttgggtgtagatggttttgtagaagttaatccaattacctctaaagcagataaagatttctgtaaagagaatggactatggattgcagatattgtctactatgatggtgagcagttccatgtaacctcatacccaaaactgaattatgatgctaataacctgaagtgctggttaaaaggggttggttataatggattcacagaacattaataaagaaggtgtggctcagaagagccacttctcaaactacaatatctctatgacggtgtttatgaatgacccgttacttgagaagtatggtgagactccagatacacttctggataatgaacaagttttaaaagcagttctgtacaaatacgggattgatattgagaaagagtattcttttgaaatctgtcaacacaggaatacttttggtaaagttgtaatggctccactcttcatgggtgtagaaagaactgactatggttggttatatctaaaaagaaacttggagaaataccgtgtctaaagcaaaaaagctatcttatgatgacattatctcaggtgctaaattaggtgttgatagtatcggacaagatgttaagcacggggacacagtcatgtactgtgacgacagaagaggcagaagtgcaatcttgtttggaagagttgtgtgcaagatgcgaggtaattacgttgttgaagacatgaatgtggatgtcacaaaacagcttgaaataattatgaatagtgatatatcatggttcgtgaattgtatgcacacctcttcagtcacaaaggtaagtgataagttttacgatatgtggcagaatgagcaaattttcaagatttaaactagggagcctcttcggaggctcttttcatctgtaggattcaaaaatgattaagacaattaaaaaatcaaacggtacagtagtaagctttgacccagaaagactgaataagtgggcatcatgggcagataagcgtggaatcatctggtcagaagtcactatggaagccatgaaacgtgtctatggaggttgcactacaaaagagatgcaccaagctatgattgatgtttgtgttgataaacaaactcaagagtactcagacatggctggacggctacttctaggaattatctacaaagaagcctttggaggctttactaaggttcctacgctggttaccttcgttaaaaatatggagagagcaggactttgggagaagatggattactcacaggaagagcttgaatacctgcaaggttacatcgtgcactcaaaagatatctcttacggttatgcagtcttgaaacagttcagagacaagtatggtatccgtgatattaaaacgggaagactttttgagtcaccacaatttatgtttatgggtatggctatgaaagcctttgagaagcaaccaaagcaccgtagactgcaagatgttatcaagctgtacacttacctatctgacctgaagattaacgctcctacgccttatttaaacggtttgagggcaactaaatcaggttatgcgtcatgctgcttgattaaggcaaacgatactgctgaatcacttggtattgctgcaaaggttgcttatgatatgactacaaagcaagctggtatcggtatgctgatggagactcgcactattggtgatggtatccgtcaaaacactatcgaacacatgggtaaactgccttattacaagcttgtacgttcatctgtagaggcaaacaaacagaagagtcgtggtggttcagctaataacttctacactgctctagacccgcagattgaagatttactgcgtttgaagcaccctacaacggttccttctaaacgtattaatgagatggactactcattcggcacaaacgattatttctggcagtgtgttcagtatgatacagattggttgctattctcttacaaagatgcaccaaaactctatgacatgttctacacagcatctgctgatgagtttgctatggcagttggtcacgcagtacattcaggagttaagcacagacgagtcaaggctcgtgaaattgctaagctgtttattcaacagcgttatgctacaggtcgtgtgtatccattcttcactaacaacgcaaacacacatacaccatttaaagaaccattgaagatgtcaaatctttgtatggaaattgtgttgccagtgtatggttttgagaaagagacagacctttacagagacgatgctgtgaaagaggatggtgaggtggctctttgcttcctagctagtttggttgcagggagaatttcagaagatgaatacgctgacgttgcttattatgctcttgcaatggttgactccgttattgaccttatggattatccgtatccatcgatgcgcaaccatgttcagaagcgtcgttctgttgggattggccttacaaatgtggctcattaccttgcgaagaactacgtgaactactcttcacgagcaggtaaaacgaaacttcatgaactggcagagatgcactcttactatctgcatgaagcctctctgagacttgctaaagagcgtggcgttccagagtacatgaagttcactaagtatcctgaaggctgggttcctccaaagacagctaacaagaagattgatgaaaagcatgatgcaaaactacgatatgattgggatgacttagcacaacgtatcaaagaaaatggtggaatccgaaactctgtattagaagcttacatgcctaatgagagttcttcactggcaactaatacgacaaatggcttgtacccaattcgtgactttattttaactaaaaagtctgcaactggtaacgtgctgtttattgttccagattatgaagagttgaagtatgtatatgaaattgcttggggtattgacacctttgacctgattgattgttatgcaattgttcaaaagttcactggtcaagctatctcttcagatttctatgttgactacgcaaaagctaagaaggtatcattggctcaagctttgaagtacatgatttatgccaactcggtaggtatgaaaaccatgtactaccttaacagtcgcattggtgtaggtaaatctgcactgcaagatgcttattgcgagggttgtggtgtttagttttaataactatgagggtcgtagaagaccctctaaaaataactttggagagaccatgaaagatttaatagaaaaacatgagcgaccaatatacttgctctacaaaccccgcaaaacattgtactatgtgagcagcacaggtatcatgataaagcagaatgatgacttatgggtcactggagcctcttacatctctacagcagatggtaaaatctacgcaagaccttatgagatgtttaacaaagagaattgggaagttttagacagaaaacaagccttagaaatgataaagaaaggagaaatcacgctatgattaaccagcacccaatctttttaggtggtgagagaaaaacttttgactcactcaataagcactacccaaaaatctttgaactttataaacaacaaaaagcacaagactggtcagaagatgagttcccttttgaacaatcacgtcttgattttgagagtgtcccagcatcaatgtcaggtgtaatgcttgagattcttaagtggcagtgggaagcagacactcaagttgctaagagcttggcatttgcctttgcaccctttatctctgatgacatctatgcaactgcaattatgaagcagtctgagattgaaaacctacatgctcttacttactcagagattgtaagacaatgtattaaaaaccctgaaacaatcttagatgagattaaccagaatgttgctgtacaagaccgattaaaaactgtgaatcgtgttcttgaagaattactggatgaaggtataaactatcgtctgagttatgtgcgtgactcacttctggacaaagaccctttacacttccataaagtgattctaaaagggttgtttgcagtgactgcgcttgaaggtatatcttttatggcatcctttgcatgtacttttgcacttgatgctcaagataaatttcagggtattgctcaagctgtccagaaaattatgcttgacgaaatccttcacactaaaattgatattgaagttttaaaagaaactttaagagatgatgagtggcagaaagcttttcaacaaattcttccagagattaaagtaatcttagatgaagtagttgaaagtgaagagaaatggtcgtattatatcttctccgaaggacgtgctgtagttggcttaaatacaaagcttcttcatgagtgggtttactataatgctgccccactgtatgatatgtttggcattcccagagattttgtagctcctaaagaaccacctttgaagtatatgattaagaagatggaaattgataaagagcagaatgctaatcaggagcaacagaacggtgcgtacctattgaatactgttgtagatgatttgaatagtggatttttagaggttccttaatgacttatgtaatttactccaaaactggatgccctcagtgtgagactgcaaagaattttgcaaaagctcgtggtattgaccatgttgtgagaatgttagggcaggactatgaactatcagacctgatggagattgcacagatgccagttcgtcagatgccattcatcatgaaaactgatggacaaaacctaaaacctgttgggacgctacagaattttatggcagaggtgaataatgcttaaacgcatttgggaaggtttggttgttgatgcaccagcgattgtgattggtatgttgattgttaacctatttactgactttgaacaaggttcattgtttggagccatgttactatgggttatcttcgaaatattagagatacaattaggtatcactgaaaaactaagagaactctttgcgaagttttctaaaaagatttaaaatgaaagggtctcttcggagacctttttagcatgtaaaggggcaataatgaacaaagtacagattattaaaaagaatggctcactcgaagaacctgatatcaaaaaagttttagcagcagtcacaaagtcagctaacagggttggatataaagaactgccaccagatgttacccaagctcttgagtcagcatttatgaggattctggtaaagtccactaaacagaataatttactaatttcggtaaatgatattcacagtattgttgagggtgctttggcagaagtcaatcacgaaatctatgagtcttactcaacatatagaaattaccgtaaagaagttgctcaaaattgggatgagctttaccagaagaccaaagatacactcttcttaggtgacagagagaatgctaactttgacagtagtttaatctctacaaaaggttcaattattcgtggttatctgactaaagaaatctttaaacagtaccatttaacaccggaggaacttgaagccattgaaaaagggtttatctatatccatgatttaagagacctaatttttggtggtatcaactgttgcctgttcgacattggtaaagtcctgaaaggtggttttgaaatgtctggcatcgaatattgtgaaccaaagtctgtactgtcagccttacaggttattggtgatgtagttctttcagcaactgcacagcaatttggtggctttactttagcagagattgataaggtacttgtaccgtatgctaagaagtctctacgttaccatgctgaaaaagcagcatcttacggtattcctaaagaacattaccacaattatgtcatggagcagctacagattgaattaactcaaggttttcagtctcttgaaatgaagctcaatactgtaccttgtagccgtggggattttgcattcacaactttgacattcgggttacttgactcagatatgtctaatgaagataaccgactgcaatacatgattgcaagtactatcctagatgttcgtatgaatggacaaggtaagagcaagaagcctgttgtattccctaaactggtttatatttatgaccagaaaagacataatgagaatatctgtcaaggccacctgtacagtaaagctattgagtgttgctctaaagcgatgtatccagatttcttaagtgtatctggtcatggtgctgtagcagaagcttttgagcgttctggcaaggtaatttcgccgatgggttgtagagccttcttatctccatatcttaatgaggatggggaagagttctacgttggtcgtgctaacattggtgctgtatctttgaacttaccaatgatttaccagtattctaaagagaatggtttagatttctggaaagagcttgataagtacctagaaatgattcgcagcttccacaagaaacgttacgaaatgattgctaatatgccagcaagttctaaccctcttgcatttacacaaggtggtttgtataaaggaactaagaagcctactgacagggttggttgggatattgtgaagtccttcacagcttcttttggggttactgcgcttgatgaactatctgttcttgctgaaggtaaacgacttcatgaagttggaagctgtagttttgcatacgatgttctggaatacatcaacatgaaaactgaagagtttaaaaatgaagatggtttcttatatgcagtctatggcactccagcagaatcactttgtggaactcagctaaaacagttcagagagatgtttggcgttagcaaaggtgtttctgataaggaatactttacaaatagtttccatatgaatgttgcagcagacatcacaccatttgagaagcaggacttagaagaacctttcttccatatctgtagaggtggaagaatccagtatgtaagggtagctaatccagagaacttatcagcacttaagagttgtattacaagagggatgttgaaaggtttctatcagggacttaactttgacttagcaatctgtgaacattgtggtaacagaccaaaggctgatgttgaagaatgtgaggtttgccattcacatgatatctctgtgattaacagggtgtgcgggtatcttggatggactaagattaaaggtgaatcccgaatgaacgatgcaaaaatcgctgagattcgtgacaggatttctatgtaaaacttgacaaggtgatgtgggtcttgataggcttacatcacctttttttttttattggatgttagatatggcagatagtattattgggttattcataggttctgtcttactagggttctttttaggactttcttattgtgaattgagagataagttaaaatgtttaagatatcaaaaacgatgatatacatactccacattctagtcttcttctttggggttagtgttatggtatggggtttttcagacccacaatggagtttctcatatcatggtcagatggatttatggtcatgcttcaaaccatttttagggttagctatagcattcagtgcattaccaactaaggtgaaattatgattaagttgagccaaaaacagttagagtggattaaggattacgcctcagagtgtggctcttgtgaaaagaatcacgtaaggtactcaacattccacacggtcttcacattgtatgttggcgacaacgttctaagtgattccgtagtggatggtgtaccgttacctaatgagttacttgacaaattagctgtagttactggaacgtggagtgaagaagatggtcacgacctatctaacgatgttgtcttctacagtcttgaaaatattatgaatccagagtacattatgctaatgacttgtgcacaagactgtgttccattacaaaacttcattaaagagcactgtgaagagtttattactaaacaggttccttgtcaggtagtgtttgaatgagtaaaacaattaaatagtattggtgaggtaactagatgaattacatggagattcgaccatttgacacagctaatggtgaaggggttcgggtaagcctcttcgtagctggctgtaaacatcactgtgaaggctgctttaacagggagtcttggaagtttaatgctggtaaagagtttacttatgcaaacctctacggcatcattaagttaatggatgataaggccattagtggactgtcaatacttggtggggagcctctggatgatagaaacattcaagaggtcaccaacatatgcaagcgtattaaaactgtttatccagaaaagtctatatggctttggacaggttttcaactgcacgaaaaaatccacttagatgtgatgaaatatgttgacgtggtgattgatggtaagtatgattcatctaaaccaacagttaaaccatatcgtggttctgataaccaaaacctctggagaaaagagtatgggtggcaaggtgattgtcagtggagagccgagtaagtctcgtcgtaaagtaggttatcggtaaaggccactttacaatgtgctacagaacaaacttaaccgttggtgtcactgaagaagaacttaaagcattttgtgaaaagattgagagagatacgaaatgggaatctggaacagttttaaatcaaaagtaaaagcagcactggcatcactaggtatgctcactggtgttgatgtgactcatctcatgcagcacttcaagatggatgagaaactagctaatgagattatgaaaagtatctatgtaggccgtggtaaaggtggtaagaaacaagcacatcgaccaactggtgcagcagctattaaacgggcagctaagaaagctcgtaaccgtaaacgtaataagaaggctaaataatcatgagcaaagtttataacactcgtaaattacagattttcgtactgtgccagtttatggctaaagagtataactgctactactgtggcacagggttcatcagtgacaatgacggctcatatctaccgttcaaagaggctgtaaaactcttcaatgaagaagtaagctctaagaaagatatcgaaaaggttaagctaacctacagtaagaaagataagaagattatctgcctagataactttgtaaaagttactggagaagcaaaagagtttatggatgagagtgagatttcattcacaagcatcttgaaagtagctcagtaaacagatactataagggaactgcaaaggttccctttttatttttggagataacatgtatctgtcaaatctgaaacgttcggctgcaatgtcagttctaagactcagctttgaggaacgtcaagagttcattgactcccaccaatacgacccttctaactctaaccgcatgattctctggaatcgtgatagtactcgtgaaagggcactattccgctattacccacattacaccatagataacctgtatgaatgttttgttgtgaagaacactatcacaattctcaacaaactttgcagatacacaggtaatcaatccttcacattaggtcaccacaagcctgttacaaaaggtggtgaacatcactgtgcaaactggtttatccagactaaacttgataaccagaagcaaggcgatagtcttttaagcacccctaagatgacctatgaagagcaagagaaatatatcaaaaataatatgccagatgtgcttgacaacagctatacagatttggcaatatctctcctgttgaagttcgagacagtttatagggcaacttacgatggctagaacagattgggaagtaaaagaacttgtaagtgatgctggaaatggctgtgaggtgtatatgattcgtggccatgtgccagacccattagctattgagatgattgaccatcacacaagtggattctacaaagaactcggtgaaccaagtgttgaaagaacttggacaaaaccagtaccagatagcacaggtaactgttcagtaatctatcacattgtgaatccacaaaaatgcaaaacagctatggctgtgacattcgtaacttttgattgagagagaaaattatgaaaactattattgaagccgttgtcaccgcacaagagaaattcttccacacagaaaaatttaatatcatccaatttccatctggagaaattggtggaaacttctctgaagactttgttaagtttactgagcgtaatgctggtaagattgacaatgttatattgactgtgcagggatatgataaagatacactgtttgcattagctttggctaaggatgccgttgacagtcttgttccatacaaatcagcgatgaaaaccgttgttttcgggttcttaccaaatgctcgatatgaccgccatatgttcaaaggtgattcagcagcactgaaagcttttgccaacctcgttaatgcaatgggctttgatgcagtgtgtgctcttgaccctcacagtaatgttgcagaaaatttatttaagtgctttcagagcatgaagcaaaaagatgtagcagcacactttgcaagtgacccacgcattgatttcttggtagccccagatgcaggtgcagctaagaagactgaagagactgctaaagaggtagataagccatatattacaatgtctaaagtacgcaaccttaagactggtgaaattactggtatgcgaatccttgatactgttgatttgaccgataaaactgtcatgattcttgatgatatttgtgatggaggccgaaccttcatagaagcagctaaacatcttcgtgaagcaggtgcaaaacgtgtggaactctatgtaactcatggcattttctctaaaggtgttgaaaacttacttgacaatggtgttgaccatatctacactacaaactctttaggggaagctaaagaccgtggcttaacacattatacccaagttactgtagtaaccattgattgaaactttataggggcttcaaagccccattttgagagagattaaaagatgactaaatcactttatgcagtaccagcaggtttaaacgcagatgcttacaaatctggtcacatttaccagtaccctagtgcaacagaatacttgatgttcaatctgacaccacgtagtgataagtggttcaacagccccttagcaattgatggtgtagtcgcttttggtattcaacgttttgttaaagattacctgatagaccactggaacgccaccttcttcgaacgtgacaaaaaagaagcaattgacgaaatcttagaagttatgaacggtgttctgggtaaagatgctattggtcgagaacattgggaagcactccacgacttaggttatctaccagttgaagtctacgctgtagaagaaggcacagttgttcctatgcgtgtaccaatgattgtcttccagaacactgtttcaggtttccattgggtagcgggatatctggaagatgctttctctgctgagatttggaaggcttgtaccattgcaactattgcattgcactacaaacgtatctgtaagaagtggtctgaccttacttgtgacaacgacttacatttgccttatcagtgccatgactttgctatgcgtggtatgtccggctttactgatgacgcatttaacgctgtaggtcacttaacaagctttaaagggactgatagcttccctgcggtatatacagctaaacgcatctatggacagtcctatccaatctctgatattggtagctctgtaccagccactgaacactctgtaatgtgtgcaaacattgcttgggaaggtggtaatgagttgattgaagaagaaagacgcttcaaaggtgagttacaaaccttccgtcgcttcttaacagaaacttacccaactggtattgcaagtgttgtttcagacacttataatttctggagaactgtatcagtaatactaccagaactccgtaaagagattatggaacgtgatggcaaactggtaattcgtcctgactctggagaccctgtacatattgtcacaggatataaagcaattcacttagagtgtgctaaaaaggcttattacgaacacctaagcaagcagaatgccagtgacacaatgttgagcaccgtcctgaacatgaagcttgaagatattaactatgttatggctgggtggttacgtgcagaaggctatgaaatggtggttgacagagaagactttgaagtagccgatacagtgttgctgaaagatgcttacatcaacggctctgcaaacgttgtaacacgtcctgtagcggagattgatggagctattaagacactgtacaacatctttgggggaactattaactctaaagggtttaaggtactggatgagcacatcggccttatctatggtgactctatcacgctggaacgtgcaaacgaaatcctgaagcgtctgtatgaaatgggttttgcaagctctaacgtagtgtttggtgtaggctcttacacttaccagtacatgactcgtgatacctttgcatttgctgtcaaagcaactcttgcaagcattggtggtaaagagattatgcttgcaaaagaccctaaaacagatagtggtgttaagaaatctgcttttggtggtgtagcacccatgtgggatggcgaaaagctgaaagctgtagatggctatgggttccagagctttgcagatgtacttgaccacccagcttgtgctttacgtctagtctttagtgactctgagcagttcggctacacaactcttggtgatattcgaagtaatattgacaagcagctttaaaagtatatgataagaggctcctacgggagcctttttaatttctggagaatattatgaaaatcaaagagatgaacatcaacattgtcttagaagaacgttgggagaacatcaagaagcctgaagatggtcataagttccttaacaaaatcttagtagcagctaaagaggaactgactggtaagattgcagcagcaatcacaataaaggtttgtgtaaaaggtcttccagacaaccaccaatttgcacttgacgagtttaaagaaagcttctacaatccaaacaaacagatgcttgaaagtaactttgcagtgtctacaagtatcgtccatgacagaagctttatcctttacaagaatatgagaggtgagtcatgcaagcatattggatagaaattttactgtcacttggcagtgtagcagtctttgtttaccttctttgcaagtactatgcagagcacaagaagtgtgattactgcaatggggaagggtatacaagagcaggttgttgccctatgtgtggcggttctggtaaaatgtttaataagtaattcaacagtaaactaagaggaaagtattatgcgcatggtaaacgaccacgcagaagtgattaagagttcaacttctttggagacatctcaagcacagattacaatgacacctgaaatgttcagccttctgagttctggtgtatacacatttaaagaaagggcagtgattcgtgaactgtcatgtaacgcagtagatgctcagaaagaagctggaagagagaacatcccgttccatgtgcatttacctactcgttttgagccttactttgaagttcgtgattttggaactggattgactcatgataaagttatgagtttgtacctaaactacggggcttctacgaagaatgactctaatgattacattggtgcaatgggtatcggctcaaaatctccatttgcaattgctcagtcattcacagtatctagctatgttgacggtgttgttaataagtactctgtttatcttgagaatggtatccctcaagtaactaagctgacaactaacccaacaaaagaacctaatggtttagctgtacgtgtggcagttgctgaccaccgtatctcaaagttctttgaagaagctggtaatgtatactcatactttgctgtaaaaccagaaagtaatattgtgtacgacgatgtattagcagatatgaacgtcattgcccgtgaagagggtgtttatgatgccatgattcataagcaaagttggcgttctagtggtaacaggacagagtttaatgtggtgatgggtaacattgcctaccctgttaacatggaagcattacttggtgatgacttcttcaaagtattgccagaatttttccgtaggagcgtagaccttgtaaacatctacatgcctattggttcagttgctattgcagcttctcgtgaagcattgcagatgaatgacacgacaaaaaatgttatcattgaggctactaaaaagataactgaagccattacaaaggatgttatcaagaaagttaatagccaacctacactcatggatgctgcacaggcttatgctgagttacgtttgaactcacgagagatgtttaatgctgtgtgtccaaagctagagtggggaggcgttaagcttgattctctggaagaagaattgctaaacattcgtcgtgggattatctacgcagaagacggctcagtcatttatgaacgtgatggtaaaggtaatattaaggttgacagtaaaggaaacaacattcctaaagtggactacctatacaatccagttgcttatgtcaagttcaactctttagagagtaagattcgtgcaacagcactttcctacactcaagaggcaagtatgttcaatatctttggtgcaatgcgtaaaagccaaattgaacagtttttgttcgtgattaatgaccgtcgcaataaaaacggtactgagaagactgtaggacgcaatcaaattttgcgtggtgcatgtcgagactacgccagtgagtcaaatctgtttcacagatacaatggtattgtctttgtattctcgactgaaaaagagttagatgatttaatcaatctacacaaacttgataaaagcttgttaaagattgtgaagatgtctgataaggaacaccactatcagcgtaaagaagctgtaaggggtgttgtaaaactctggaaagctgttccagcagaaactaaagcttcatacaaagaggtgtcagaagacttagacacaattgaagagcctcagctttatattaaggcagtaggtgacacagttgatggtagatgtttttgctcatctccagaggatgtagctaagtcagttgctaatgttacaggcaagacagtctatgttttccgaaaagcaaattggaaaaagataccagaagactggattgaagtagatgagaagctcttgaacgacagcttaactgatgttcattggattaaccataacaggtatatgacacgcatctacatggatggtgtcctcgaccttacaagcagttggattattgccagaaactttacgttcaataacaggaagatttctcgcgggtattgttattcaagggatactattaagacaatcttcttagaagggaatgaagatgctgttgaggcaatgttcggtaagattcagtatgtggctgcaccgtttgcatacacttacactatcagtgttcttcaggatttgaagtcatgccttgataatgacacaaaactgtacaaaaagattaaaaaagcaggtgaccgcatggttatcaagctgacaaactatctttcaaaaagaaaacaagaaaacttcttgctttcacacttagattggaataaagtatcacctatcgaagtgagtaagtttttaggctttaatgtgaaatgtgttccagaaggtacaacaatttacgattaaagtgtttgacaaggggctttgaagccccttagaatagcctcacaaattgattgattaactaacaagagagagtaataagatgactactaaaactaaagcacagattgacgcagaaatttacaaactggttaaagaaggtaagctgactaaaacagctattgcacagaagttcaatacttcaacccgttcagttggtcgtgctgtagagcgtcatgaagcaaccttaaaaggcaagaagaaggcaacttctacaccagctacgaagactttgaaacaagttgctaagacttttaaaaagaaagctggcaaaccagttgaaaaggtcgttaaagacactgtacagaaagctccagtaaataaactgcacgaagctatgcagaaagatgacaagattgagtacatgattactggtgattctgtaattatgacttatggttcagaatctgaaattgttgagtctactcatccgaactatcaagagattgtagttcatgttgtgaaaggtgagttcaagaaagcatttgaactgatgaacattcgtaagtctatcgaaaacttcactcagggtgctatcacaatcaaaggcgacaagctattctacggtgctgttgagatgcgttctactctggttgaccgtattcttcacatgatgaaaactggcgataaaggttttgaacgacttgtaatgttcttcgaaaaactgatggaaaacccatctaaagattctgtagaacaactttggggatttgtatctcaccttgatgttgaaattgatgaagaaggctacatcattggttggaagaaagtctctactcgtgaaggcaagctggttgactctcacacctacaaagtgcctaatgatttgggtaacattgtagaaatgccacgttggatggttgataataaccgtaacgtaacttgctctcaaggtcttcatgttggtgcttgggattatgttcgttgcttctcaggtgatacaatcctgaaggttcgcgtacatccacgagatgttgtatctgttccaactgattacaatgatatgaagatgcgttcctctcgttatgaagttgcagcaatcgttgataatcaacgtaaagtgctggaagcatgggacggtaagactgaagctttgcatgtcatcgttggcactgctggtgaactcatctctcaacgtaaacgtgaaatctaataagtaatttcttaaaaggctgcttcggcggccttttttatttgtattttgtgcagagtgctgtataattgatgtcacgataaactaaacaggagaaccaatgaagaaattgattctaggtttgtgcttaatgtttacagcacacttatcttatgcagttgactgcccagagctatcaattagtcaaaaagtaaacatgttaaaagcttaccagtatggtgagaataatatggggaaaggctggggtattactctagcagctatagccttacaagagtcagagttaggtctgaaggtagagaataaaaagacccacgactatggtattttccagaatcacttgaagactgttgtaaagcgtaacaaaattagtcctaatgtggctaaaaagaaactcttaaaagactttgactatgcagcaagagagacacataaagagcttgagttttggactaaggtacatggtcacccaaagtcaaagaagactttacaaaaagttttagcatcatataatgctgggtattcgtacaaaatccctaaagctaagaaatactctcaagatgtctataacaatatgaaagttatcgctcaatgtgaatttgcaacaaacatttctaaggtaaatcatgaaaaaattaagaaagtctgatgaagtcctgtgccatgcttacgacttgcaccctcatgagttaggtcttgattcctgtgtatggactccagaacagtgcagggattttgaagatactgcaagagaagttgtatgttcacttgaagagttccacacatcagaaccaattgtgagcgttgtggacaaagagactggacaaactgtaggtgtaaggcgtgacagcttagtcatagtcaataaagaccttgtagaaaaaggtaaccttatcttagcagatattgatggtgttcttacaaattttaatcacgaagattgctcaacggaattgactgatgggtcattctcacagtacactaatcttcttgactctgtaagagcaaaaccaacatatgtttttagtattattgatgcaattgctaatcatgctgccattggactcttgacagcgagaggtgaatctcagagaatacctactgagatgtttttaaggcataacatagagcatgattacatgctttttatgcgtggttttggaactaactctataagtgcagaaagtttaaaagtgaggatgattcagtcttgcattcttccttattttaatatagtatgctttatagaagatacagagaagaatgttcagaaggtaaacagaatccttccacacattaaaaccatgttagttaaacattgagagaaaaacttatgaacaatatcattacggtagcactggacgatacggcaaacaaatctgaagtagttcgtaaaatgattcaaggtaactttgaaggtaaaattttccgtgctgttaatgtaaaagctgatggcagtattcgtgaataccgtgcattgttgaatgttaaaaagcacgtaaaaggtgctggttcaacgactgcacacaaagaaaacctgatgactatctatgatatgggtaaggcttcagagttaggtgctgaaggtatcgttaaagaaggtgctccgtatcgctctttcaatctggaaactactcttatgctttcctttacgagtggttctaaaacaatcacttatctctttactgatgctgcaacggtatctgctattaaggatagcactgtcaaagctggcgtagttgctgctgcaaaagcttcttcgatggctgcgaatatccttgctaaagtcctcggttaaggttaagatacaggctccttcgggagcctttttcatttcaggagattgttaaatgacatttaaagagttctgtcaagctactttcataattgttttcttagttggtgcaggtgtctggggaggatactcttacagagactatcaagttgctgaaactgagctaaataatgagaaactaataagtgttgctaaagatgcttatcaggaaggtttagccacactcagcaccaattacaaaaatgatttgaaagatgtgcttgctaagaataagcatacaaaagaggtactaacatatgaaaaaactaagccagagttttataatgtttgtgctactgataactatgtcagggtgttcaacgaacaaagtgaacagtacattcaaaaactcccaagtaagtgagagtgataagtacactcaagaagaatcacggtatatcatcaaaggcaacacaggcagtgatgtagcagcagcccttgagttctatcgtgacggcttttaccagtgcacaatcaaagctaacaaccttattgacatgattttattagggaataagcagcaatgacagagaatcaagatactttctatgtagaaggttacttactgttgccacgaccaaaagaaacttatatgcgaattgatttcttaccaaccattatggataatgtgatgtgccatatctttatgcaaggtgtcacagcacagcttaagcatgttggtaaagagtgcaaaataaaggttgacactcatccagaaatcaaagagaatcactacacatggttcttaccagactctaaagaaatcttagcagttcttaaaacgaggaagtaactatgcagattaatggaagagactttgtagccgtttactacgagaaaggtaaagaagttggcgtagcacaagtgtcttatggcaatggtaagtggctatatggaacaatcgcagtagttggaacaagaagtgatacaaaaacttttaaagattgtgttgaccttcttgaagaatccattcagaatcattggtgtctgatatggatgactgacaatgaagtgatagaacgcttcaaaaagattgatatcaacattgatagtattgagcatgttgatttatatgagctaactgagaaggtaaactatgagagtaattctagccagagataaaaagacacggaaactcatccggtcagcagtattcattggaagaaatgaagtcatcccgtttacagcaaacgatgtgatagcctacaggaaaaacttagtatttagtgattgcttgcgtggcttcatctcccaaccgttggaagactttaaaagccgttgtggtaaaggtatcatcattcaagaggcaattatcaatggctgacttctgcaaagactgttctatagaaatgtttggacgtgatacaggtgacttaaaaggtcttatcactgaagatgactttaaagctggctacgcaatgccagtaatctgtgaaggttgtgggtgcatctgggtagaccacgaaggacagcgtgtaaaaccttcagaagataaagaatcttgggagagatgttaaatgggtattgtaaaaatcatcaaaggtgatatctttgatgcctttgataaaggcaaatttgatatcattggtcatggttgcaactgtatgaatttcatgggtgcaggtattgcagcaactatttctaagcgttatccaaaagtgtatgatactgacacagaagtttacctgtttgcaggtggcattcgtcacaaaccctgtgaaaatttactaggtaatttctctgtagcacgtttaaaacaaggccgtatagctaacctttacacccaacttcatactggtaaagatgcccgatacagtgctttagagtcatctttgaaacagcttaacagatactgtgaagttaaccagttgaagaaagttggtctacctatgattggtgcaggtatcggtgggcttgaccctcaagctgtcacagttatcattaatcaggtgatgaagagtgtagatgtttatctgtatgtctatgaagcaaaaatgtataatgagttacactcaggttggaaaaactactgtgaaccagaatactttgcaggtgtagttgtgttcacagataacgaagttaccctcttcagacgaagaaaaggtaagatacatcaaagtaaccctccggttgaaaagatgtctctgagtaacgctctagttacccacctgtcgaagagcaatcacaggattgcagtaacatttggcagtgatgcagatacttatatctatgcaagaactgatgaggatatcgagacagttttctcttcgccagaagttaccttcttagacgcaaagaactaagaaacttcgtaggatattcacaatagactaagcctttcttatctggtaaatttttcaggtaaggagggctttttcatttcagaattgtgcaggtatatttctatagagaaatctgtagaggaaattttgaactccaaagagaaaattcattttcaaactgtgcaggtaatctccaaagggttttttcattttcaaaacgtgcagagaaaaatcaggtcgggcaagaaaaatcattttagatttgtgcaggtaggtttttatagagagccagaccaacccctctccccctcttactccccctctccccaaaagtcaagagaaaaatttgtagcggattgaaaaataattcttgatttgtgttctgttttgtggtagtcgtgtgcgcccgtttcattacagttttgccaaaaatatttttaaaattttttcttgactctttgaacgtggttatctagtatttgcatcaacggggagggaatgaccttccccactaaataaagtcctaaactggagattcaaaaatggcatatcgtgcacctaaattcatcaacaaagacaactttcgcaacgcactggagaagtcacttgatgaaaattttaaaggcaacattatcgttgttcacgcattcaattttaagtatgatgtaaacgggaatagaatcaaccatta

SEQ ID NO: 2 - DNA, 87662 bp, Artificial sequence
  found in bacteriophage isolated from environment
taatggttgattctattcccgtttacatcatacttaaaattgaatgcgtgaacaacgataatgttgcctttaaaattttcatcaagtgacttctccagtgcgttgcgaaagttgtctttgttgatgaatttaggtgcacgatatgccatttttgaatctccagtttaggactttatttagtggggaaggtcattccctccccgttgatgcaaatactagataaccacgttcaaagagtcaagaaaaaattttaaaaatatttttggcaaaactgtaatgaaacgggcgcacacgactaccacaaaacagaacacaaatcaagaattatttttcaatccgctacaaatttttctcttgacttttggggagagggggagtaagagggggagaggggttggtctggctctctataaaaacctacctgcacaaatctaaaatgatttttcttgcccgacctgatttttctctgcacgttttgaaaatgaaaaaaccctttggagattacctgcacagtttgaaaatgaattttctctttggagttcaaaatttcctctacagatttctctatagaaatatacctgcacaattctgaaatgaaaaagccctccttacctgaaaaatttaccagataagaaaggcttagtctattgtgaatatcctacgaagtttcttagttctttgcgtctaagaaggtaacttctggcgaagagaaaactgtctcgatatcctcatcagttcttgcatagatataagtatctgcatcactgccaaatgttactgcaatcctgtgattgctcttcgacaggtgggtaactagagcgttactcagagacatcttttcaaccggagggttactttgatgtatcttaccttttcttcgtctgaagagggtaacttcgttatctgtgaacacaactacacctgcaaagtattctggttcacagtagtttttccaacctgagtgtaactcattatacatttttgcttcatagacatacagataaacatctacactcttcatcacctgattaatgataactgtgacagcttgagggtcaagcccaccgatacctgcaccaatcataggtagaccaactttcttcaactggttaacttcacagtatctgttaagctgtttcaaagatgactctaaagcactgtatcgggcatctttaccagtatgaagttgggtgtaaaggttagctatacggccttgttttaaacgtgctacagagaaattacctagtaaattttcacagggtttgtgacgaatgccacctgcaaacaggtaaacttctgtgtcagtatcatacacttttggataacgcttagaaatagttgctgcaatacctgcacccatgaaattcatacagttgcaaccatgaccaatgatatcaaatttgcctttatcaaaggcatcaaagatatcacctttgatgatttttacaatacccatttaacatctctcccaagattctttatcttctgaaggttttacacgctgtccttcgtggtctacccagatgcacccacaaccttcacagattactggcattgcgtagccagctttaaagtcatcttcagtgataagaccttttaagtcacctgtatcacgtccaaacatttctatagaacagtctttgcagaagtcagccattgataattgcctcttgaatgatgatacctttaccacaacggcttttaaagtcttccaacggttgggagatgaagccacgcaagcaatcactaaatactaagtttttcctgtaggctatcacatcgtttgctgtaaacgggatgacttcatttcttccaatgaatactgctgaccggatgagtttccgtgtctttttatctctggctagaattactctcatagtttaccttctcagttagctcatataaatcaacatgctcaatactatcaatgttgatatcaatctttttgaagcgttctatcacttcattgtcagtcatccatatcagacaccaatgattctgaatggattcttcaagaaggtcaacacaatctttaaaagtttttgtatcacttcttgttccaactactgcgattgttccatatagccacttaccattgccataagacacttgtgctacgccaacttctttacctttctcgtagtaaacggctacaaagtctcttccattaatctgcatagttacttcctcgttttaagaactgctaagatttctttagagtctggtaagaaccatgtgtagtgattctctttgatttctggatgagtgtcaacctttattttgcactctttaccaacatgcttaagctgtgctgtgacaccttgcataaagatatggcacatcacattatccataatggttggtaagaaatcaattcgcatataagtttcttttggtcgtggcaacagtaagtaaccttctacatagaaagtatcttgattctctgtcattgctgcttattccctaataaaatcatgtcaataaggttgttagctttgattgtgcactggtaaaagccgtcacgatagaactcaagggctgctgctacatcactgcctgtgttgcctttgatgatataccgtgattcttcttgagtgtacttatcactctcacttacttgggagtttttgaatgtactgttcactttgttcgttgaacaccctgacatagttatcagtagcacaaacattataaaactctggcttagttttttcatatgttagtacctcttttgtatgcttattcttagcaagcacatctttcaaatcatttttgtaattggtgctgagtgtggctaaaccttcctgataagcatctttagcaacacttattagtttctcattatttagctcagtttcagcaacttgatagtctctgtaagagtatcctccccagacacctgcaccaactaagaaaacaattatgaaagtagcttgacagaactctttaaatgtcatttaacaatctcctgaaatgaaaaaggctcccgaaggagcctgtatcttaaccttaaccgaggactttagcaaggatattcgcagccatcgaagaagcttttgcagcagcaactacgccagctttgacagtgctatccttaatagcagataccgttgcagcatcagtaaagagataagtgattgttttagaaccactcgtaaaggaaagcataagagtagtttccagattgaaagagcgatacggagcaccttctttaacgataccttcagcacctaactctgaagccttacccatatcatagatagtcatcaggttttctttgtgtgcagtcgttgaaccagcaccttttacgtgctttttaacattcaacaatgcacggtattcacgaatactgccatcagcttttacattaacagcacggaaaattttaccttcaaagttaccttgaatcattttacgaactacttcagatttgtttgccgtatcgtccagtgctaccgtaatgatattgttcataagtttttctctcaatgtttaactaacatggttttaatgtgtggaaggattctgtttaccttctgaacattcttctctgtatcttctataaagcatactatattaaaataaggaagaatgcaagactgaatcatcctcacttttaaactttctgcacttatagagttagttccaaaaccacgcataaaaagcatgtaatcatgctctatgttatgccttaaaaacatctcagtaggtattctctgagattcacctctcgctgtcaagagtccaatggcagcatgattagcaattgcatcaataatactaaaaacatatgttggttttgctcttacagagtcaagaagattagtgtactgtgagaatgacccatcagtcaattccgttgagcaatcttcgtgattaaaatttgtaagaacaccatcaatatctgctaagataaggttacctttttctacaaggtctttattgactatgactaagctgtcacgccttacacctacagtttgtccagtctctttgtccacaacgctcacaattggttctgatgtgtggaactcttcaagtgaacatacaacttctcttgcagtatcttcaaaatccctgcactgttctggagtccatacacaggaatcaagacctaactcatgagggtgcaagtcgtaagcatggcacaggacttcatcagactttcttaattttttcatgatttaccttagaaatgtttgttgcaaattcacattgagcgataactttcatattgttatagacatcttgagagtatttcttagctttagggattttgtacgaatacccagcattatatgatgctaaaactttttgtaaagtcttctttgactttgggtgaccatgtaccttagtccaaaactcaagctctttatgtgtctctcttgctgcatagtcaaagtcttttaagagtttctttttagccacattaggactaattttgttacgctttacaacagtcttcaagtgattctggaaaataccatagtcgtgggtctttttattctctaccttcagacctaactctgactcttgtaaggctatagctgctagagtaataccccagcctttccccatattattctcaccatactggtaagcttttaacatgtttactttttgactaattgatagctctgggcagtcaactgcataagataagtgtgctgtaaacattaagcacaaacctagaatcaatttcttcattggttctcctgtttagtttatcgtgacatcaattatacagcactctgcacaaaatacaaataaaaaaggccgccgaagcagccttttaagaaattacttattagatttcacgtttacgttgagagatgagttcaccagcagtgccaacgatgacatgcaaagcttcagtcttaccgtcccatgcttccagcactttacgttgattatcaacgattgctgcaacttcataacgagaggaacgcatcttcatatcattgtaatcagttggaacagatacaacatctcgtggatgtacgcgaaccttcaggattgtatcacctgagaagcaacgaacataatcccaagcaccaacatgaagaccttgagagcaagttacgttacggttattatcaaccatccaacgtggcatttctacaatgttacccaaatcattaggcactttgtaggtgtgagagtcaaccagcttgccttcacgagtagagactttcttccaaccaatgatgtagccttcttcatcaatttcaacatcaaggtgagatacaaatccccaaagttgttctacagaatctttagatgggttttccatcagtttttcgaagaacattacaagtcgttcaaaacctttatcgccagttttcatcatgtgaagaatacggtcaaccagagtagaacgcatctcaacagcaccgtagaatagcttgtcgcctttgattgtgatagcaccctgagtgaagttttcgatagacttacgaatgttcatcagttcaaatgctttcttgaactcacctttcacaacatgaactacaatctcttgatagttcggatgagtagactcaacaatttcagattctgaaccataagtcataattacagaatcaccagtaatcatgtactcaatcttgtcatctttctgcatagcttcgtgcagtttatttactggagctttctgtacagtgtctttaacgaccttttcaactggtttgccagctttctttttaaaagtcttagcaacttgtttcaaagtcttcgtagctggtgtagaagttgccttcttcttgccttttaaggttgcttcatgacgctctacagcacgaccaactgaacgggttgaagtattgaacttctgtgcaatagctgttttagtcagcttaccttctttaaccagtttgtaaatttctgcgtcaatctgtgctttagttttagtagtcatcttattactctctcttgttagttaatcaatcaatttgtgaggctattctaaggggcttcaaagccccttgtcaaacactttaatcgtaaattgttgtaccttctggaacacatttcacattaaagcctaaaaacttactcacttcgataggtgatactttattccaatctaagtgtgaaagcaagaagttttcttgttttctttttgaaagatagtttgtcagcttgataaccatgcggtcacctgcttttttaatctttttgtacagttttgtgtcattatcaaggcatgacttcaaatcctgaagaacactgatagtgtaagtgtatgcaaacggtgcagccacatactgaatcttaccgaacattgcctcaacagcatcttcattcccttctaagaagattgtcttaatagtatcccttgaataacaatacccgcgagaaatcttcctgttattgaacgtaaagtttctggcaataatccaactgcttgtaaggtcgaggacaccatccatgtagatgcgtgtcatatacctgttatggttaatccaatgaacatcagttaagctgtcgttcaagagcttctcatctacttcaatccagtcttctggtatctttttccaatttgcttttcggaaaacatagactgtcttgcctgtaacattagcaactgacttagctacatcctctggagatgagcaaaaacatctaccatcaactgtgtcacctactgccttaatataaagctgaggctcttcaattgtgtctaagtcttctgacacctctttgtatgaagctttagtttctgctggaacagctttccagagttttacaacaccccttacagcttctttacgctgatagtggtgttccttatcagacatcttcacaatctttaacaagcttttatcaagtttgtgtagattgattaaatcatctaactctttttcagtcgagaatacaaagacaataccattgtatctgtgaaacagatttgactcactggcgtagtctcgacatgcaccacgcaaaatttgattgcgtcctacagtcttctcagtaccgtttttattgcgacggtcattaatcacgaacaaaaactgttcaatttggcttttacgcattgcaccaaagatattgaacatacttgcctcttgagtgtaggaaagtgctgttgcacgaatcttactctctaaagagttgaacttgacataagcaactggattgtataggtagtccactttaggaatgttgtttcctttactgtcaaccttaatattacctttaccatcacgttcataaatgactgagccgtcttctgcgtagataatcccacgacgaatgtttagcaattcttcttccagagaatcaagcttaacgcctccccactctagctttggacacacagcattaaacatctctcgtgagttcaaacgtaactcagcataagcctgtgcagcatccatgagtgtaggttggctattaactttcttgataacatcctttgtaatggcttcagttatctttttagtagcctcaatgataacattttttgtcgtgtcattcatctgcaatgcttcacgagaagctgcaatagcaactgaaccaataggcatgtagatgtttacaaggtctacgctcctacggaaaaattctggcaatactttgaagaagtcatcaccaagtaatgcttccatgttaacagggtaggcaatgttacccatcaccacattaaactctgtcctgttaccactagaacgccaactttgcttatgaatcatggcatcataaacaccctcttcacgggcaatgacgttcatatctgctaatacatcgtcgtacacaatattactttctggttttacagcaaagtatgagtatacattaccagcttcttcaaagaactttgagatacggtggtcagcaactgccacacgtacagctaaaccattaggttcttttgttgggttagttgtcagcttagttacttgagggataccattctcaagataaacagagtacttattaacaacaccgtcaacatagctagatactgtgaatgactgagcaattgcaaatggagattttgagccgatacccattgcaccaatgtaatcattagagtcattcttcgtagaagccccgtagtttaggtacaaactcataactttatcatgagtcaatccagttccaaaatcacgaacttcaaagtaaggctcaaaacgagtaggtaaatgcacatggaacgggatgttctctcttccagcttctttctgagcatctactgcgttacatgacagttcacgaatcactgccctttctttaaatgtgtatacaccagaactcagaaggctgaacatttcaggtgtcattgtaatctgtgcttgagatgtctccaaagaagttgaactcttaatcacttctgcgtggtcgtttaccatgcgcataatactttcctcttagtttactgttgaattacttattaaacattttaccagaaccgccacacatagggcaacaacctgctcttgtatacccttccccattgcagtaatcacacttcttgtgctctgcatagtacttgcaaagaaggtaaacaaagactgctacactgccaagtgacagtaaaatttctatccaatatgcttgcatgactcacctctcatattcttgtaaaggataaagcttctgtcatggacgatacttgtagacactgcaaagttactttcaagcatctgtttgtttggattgtagaagctttctttaaactcgtcaagtgcaaattggtggttgtctggaagaccttttacacaaacctttattgtgattgctgctgcaatcttaccagtcagttcctctttagctgctactaagattttgttaaggaacttatgaccatcttcaggcttcttgatgttctcccaacgttcttctaagacaatgttgatgttcatctctttgattttcataatattctccagaaattaaaaaggctcccgtaggagcctcttatcatatacttttaaagctgcttgtcaatattacttcgaatatcaccaagagttgtgtagccgaactgctcagagtcactaaagactagacgtaaagcacaagctgggtggtcaagtacatctgcaaagctctggaacccatagccatctacagctttcagcttttcgccatcccacatgggtgctacaccaccaaaagcagatttcttaacaccactatctgttttagggtcttttgcaagcataatctctttaccaccaatgcttgcaagagttgctttgacagcaaatgcaaaggtatcacgagtcatgtactggtaagtgtaagagcctacaccaaacactacgttagagcttgcaaaacccatttcatacagacgcttcaggatttcgtttgcacgttccagcgtgatagagtcaccatagataaggccgatgtgctcatccagtaccttaaaccctttagagttaatagttcccccaaagatgttgtacagtgtcttaatagctccatcaatctccgctacaggacgtgttacaacgtttgcagagccgttgatgtaagcatctttcagcaacactgtatcggctacttcaaagtcttctctgtcaaccaccatttcatagccttctgcacgtaaccacccagccataacatagttaatatcttcaagcttcatgttcaggacggtgctcaacattgtgtcactggcattctgcttgcttaggtgttcgtaataagcctttttagcacactctaagtgaattgctttatatcctgtgacaatatgtacagggtctccagagtcaggacgaattaccagtttgccatcacgttccataatctctttacggagttctggtagtattactgatacagttctccagaaattataagtgtctgaaacaacacttgcaataccagttgggtaagtttctgttaagaagcgacggaaggtttgtaactcacctttgaagcgtctttcttcttcaatcaactcattaccaccttcccaagcaatgtttgcacacattacagagtgttcagtggctggtacagagctaccaatatcagagattggataggactgtccatagatgcgtttagctgtatataccgcagggaagctatcagtccctttaaagcttgttaagtgacctacagcgttaaatgcgtcatcagtaaagccggacataccacgcatagcaaagtcatggcactgataaggcaaatgtaagtcgttgtcacaagtaaggtcagaccacttcttacagatacgtttgtagtgcaatgcaatagttgcaatggtacaagccttccaaatctcagcagagaaagcatcttccagatatcccgctacccaatggaaacctgaaacagtgttctggaagacaatcattggtacacgcataggaacaactgtgccttcttctacagcgtagacttcaactggtagataacctaagtcgtggagtgcttcccaatgttctcgaccaatagcatctttacccagaacaccgttcataacttctaagatttcgtcaattgcttcttttttgtcacgttcgaagaaggtggcgttccagtggtctatcaggtaatctttaacaaaacgttgaataccaaaagcgactacaccatcaattgctaaggggctgttgaaccacttatcactacgtggtgtcagattgaacatcaagtattctgttgcactagggtactggtaaatgtgaccagatttgtaagcatctgcgtttaaacctgctggtactgcataaagtgatttagtcatcttttaatctctctcaaaatggggctttgaagcccctataaagtttcaatcaatggttactacagtaacttgggtataatgtgttaagccacggtctttagcttcccctaaagagtttgtagtgtagatatggtcaacaccattgtcaagtaagttttcaacacctttagagaaaatgccatgagttacatagagttccacacgttttgcacctgcttcacgaagatgtttagctgcttctatgaaggttcggcctccatcacaaatatcatcaagaatcatgacagttttatcggtcaaatcaacagtatcaaggattcgcataccagtaatttcaccagtcttaaggttgcgtactttagacattgtaatatatggcttatctacctctttagcagtctcttcagtcttcttagctgcacctgcatctggggctaccaagaaatcaatgcgtgggtcacttgcaaagtgtgctgctacatctttttgcttcatgctctgaaagcacttaaataaattttctgcaacattactgtgagggtcaagagcacacactgcatcaaagcccattgcattaacgaggttggcaaaagctttcagtgctgctgaatcacctttgaacatatggcggtcatatcgagcatttggtaagaacccgaaaacaacggttttcatcgctgatttgtatggaacaagactgtcaacggcatccttagccaaagctaatgcaaacagtgtatctttatcatatccctgcacagtcaatataacattgtcaatcttaccagcattacgctcagtaaacttaacaaagtcttcagagaagtttccaccaatttctccagatggaaattggatgatattaaatttttctgtgtggaagaatttctcttgtgcggtgacaacggcttcaataatagttttcataattttctctctcaatcaaaagttacgaatgtcacagccatagctgttttgcatttttgtggattcacaatgtgatagattactgaacagttacctgtgctatctggtactggttttgtccaagttctttcaacacttggttcaccgagttctttgtagaatccacttgtgtgatggtcaatcatctcaatagctaatgggtctggcacatggccacgaatcatatacacctcacagccatttccagcatcacttacaagttcttttacttcccaatctgttctagccatcgtaagttgccctataaactgtctcgaacttcaacaggagagatattgccaaatctgtatagctgttgtcaagcacatctggcatattatttttgatatatttctcttgctcttcataggtcatcttaggggtgcttaaaagactatcgccttgcttctggttatcaagtttagtctggataaaccagtttgcacagtgatgttcaccaccttttgtaacaggcttgtggtgacctaatgtgaaggattgattacctgtgtatctgcaaagtttgttgagaattgtgatagtgttcttcacaacaaaacattcatacaggttatctatggtgtaatgtgggtaatagcggaatagtgccctttcacgagtactatcacgattccagagaatcatgcggttagagttagaagggtcgtattggtgggagtcaatgaactcttgacgttcctcaaagctgagtcttagaactgacattgcagccgaacgtttcagatttgacagatacatgttatctccaaaaataaaaagggaacctttgcagttcccttatagtatctgtttactgagctactttcaagatgcttgtgaatgaaatctcactctcatccataaactcttttgcttctccagtaacttttacaaagttatctaggcagataatcttcttatctttcttactgtaggttagcttaaccttttcgatatctttcttagagcttacttcttcattgaagagttttacagcctctttgaacggtagatatgagccgtcattgtcactgatgaaccctgtgccacagtagtagcagttatactctttagccataaactggcacagtacgaaaatctgtaatttacgagtgttataaactttgctcatgattatttagccttcttattacgtttacggttacgagctttcttagctgcccgtttaatagctgctgcaccagttggtcgatgtgcttgtttcttaccacctttaccacggcctacatagatacttttcataatctcattagctagtttctcatccatcttgaagtgctgcatgagatgagtcacatcaacaccagtgagcatacctagtgatgccagtgctgcttttacttttgatttaaaactgttccagattcccatttcgtatctctctcaatcttttcacaaaatgctttaagttcttcttcagtgacaccaacggttaagtttgttctgtagcacattgtaaagtggcctttaccgataacctactttacgacgagacttactcggctctccactgacaatcaccttgccacccatactcttttctccagaggttttggttatcagaaccacgatatggtttaactgttggtttagatgaatcatacttaccatcaatcaccacgtcaacatatttcatcacatctaagtggattttttcgtgcagttgaaaacctgtccaaagccatatagacttttctggataaacagttttaatacgcttgcatatgttggtgacctcttgaatgtttctatcatccagaggctccccaccaagtattgacagtccactaatggccttatcatccattaacttaatgatgccgtagaggtttgcataagtaaactctttaccagcattaaacttccaagactccctgttaaagcagccttcacagtgatgtttacagccagctacgaagaggcttacccgaaccccttcaccattagctgtgtcaaatggtcgaatctccatgtaattcatctagttacctcaccaatactatttaattgttttactcattcaaacactacctgacaaggaacctgtttagtaataaactcttcacagtgctctttaatgaagttttgtaatggaacacagtcttgtgcacaagtcattagcataatgtactctggattcataatattttcaagactgtagaagacaacatcgttagataggtcgtgaccatcttcttcactccacgttccagtaactacagctaatttgtcaagtaactcattaggtaacggtacaccatccactacggaatcacttagaacgttgtcgccaacatacaatgtgaagaccgtgtggaatgttgagtaccttacgtgattcttttcacaagagccacactctgaggcgtaatccttaatccactctaactgtttttggctcaacttaatcataatttcaccttagttggtaatgcactgaatgctatagctaaccctaaaaatggtttgaagcatgaccataaatccatctgaccatgatatgagaaactccattgtgggtctgaaaaaccccataccataacactaaccccaaagaagaagactagaatgtggagtatgtatatcatcgtttttgatatcttaaacattttaacttatctctcaattcacaataagaaagtcctaaaaagaaccctagtaagacagaacctatgaataacccaataatactatctgccatatctaacatccaataaaaaaaaaaaggtgatgtaagcctatcaagacccacatcaccttgtcaagttttacatagaaatcctgtcacgaatctcagcgatttttgcatcgttcattcgggattcacctttaatcttagtccatccaagatacccgcacaccctgttaatcacagagatatcatgtgaatggcaaacctcacattcttcaacatcagcctttggtctgttaccacaatgttcacagattgctaagtcaaagttaagtccctgatagaaacctttcaacatccctcttgtaatacaactcttaagtgctgataagttctctggattagctacccttacatactggattcttccacctctacagatatggaagaaaggttcttctaagtcctgcttctcaaatggtgtgatgtctgctgcaacattcatatggaaactatttgtaaagtattccttatcagaaacacctttgctaacgccaaacatctctctgaactgttttagctgagttccacaaagtgattctgctggagtgccatagactgcatataagaaaccatcttcatttttaaactcttcagttttcatgttgatgtattccagaacatcgtatgcaaaactacagcttccaacttcatgaagtcgtttaccttcagcaagaacagatagttcatcaagcgcagtaaccccaaaagaagctgtgaaggacttcacaatatcccaaccaaccctgtcagtaggcttcttagttcctttatacaaaccaccttgtgtaaatgcaagagggttagaacttgctggcatattagcaatcatttcgtaacgtttcttgtggaagctgcgaatcatttctaggtacttatcaagctctttccagaaatctaaaccattctctttagaatactggtaaatcattggtaagttcaaagatacagcaccaatgttagcacgaccaacgtagaactcttccccatcctcattaagatatggagataagaaggctctacaacccatcggcgaaattaccttgccagaacgctcaaaagcttctgctacagcaccatgaccagatacacttaagaaatctggatacatcgctttagagcaacactcaatagctttactgtacaggtggccttgacagatattctcattatgtcttttctggtcataaatataaaccagtttagggaatacaacaggcttcttgctcttaccttgtccattcatacgaacatctaggatagtacttgcaatcatgtattgcagtcggttatcttcattagacatatctgagtcaagtaacccgaatgtcaaagttgtgaatgcaaaatccccacggctacaaggtacagtattgagcttcatttcaagagactgaaaaccttgagttaattcaatctgtagctgctccatgacataattgtggtaatgttctttaggaataccgtaagatgctgctttttcagcatggtaacgtagagacttcttagcatacggtacaagtaccttatcaatctctgctaaagtaaagccaccaaattgctgtgcagttgctgaaagaactacatcaccaataacctgtaaggctgacagtacagactttggttcacaatattcgatgccagacatttcaaaaccacctttcaggactttaccaatgtcgaacaggcaacagttgataccaccaaaaattaggtctcttaaatcatggatatagataaaccctttttcaatggcttcaagttcctccggtgttaaatggtactgtttaaagatttctttagtcagataaccacgaataattgaaccttttgtagagattaaactactgtcaaagttagcattctctctgtcacctaagaagagtgtatctttggtcttctggtaaagctcatcccaattttgagcaacttctttacggtaatttctatatgttgagtaagactcatagatttcgtgattgacttctgccaaagcaccctcaacaatactgtgaatatcatttaccgaaattagtaaattattctgtttagtggactttaccagaatcctcataaatgctgactcaagagcttgggtaacatctggtggcagttctttatatccaaccctgttagctgactttgtgactgctgctaaaacttttttgatatcaggttcttcgagtgagccattctttttaataatctgtactttgttcattattgcccctttacatgctaaaaaggtctccgaagagaccctttcattttaaatctttttagaaaacttcgcaaagagttctcttagtttttcagtgatacctaattgtatctctaatatttcgaagataacccatagtaacatggctccaaacaatgaaccttgttcaaagtcagtaaataggttaacaatcaacataccaatcacaatcgctggtgcatcaacaaccaaaccttcccaaatgcgtttaagcattattcacctctgccataaaattctgtagcgtcccaacaggttttaggttttgtccatcagttttcatgatgaatggcatctgacgaactggcatctgtgcaatctccatcaggtctgatagttcatagtcctgccctaacattctcacaacatggtcaataccacgagcttttgcaaaattctttgcagtctcacactgagggcatccagttttggagtaaattacataagtcattaaggaacctctaaaaatccactattcaaatcatctacaacagtattcaataggtacgcaccgttctgttgctcctgattagcattctgctctttatcaatttccatcttcttaatcatatacttcaaaggtggttctttaggagctacaaaatctctgggaatgccaaacatatcatacagtggggcagcattatagtaaacccactcatgaagaagctttgtatttaagccaactacagcacgtccttcggagaagatataatacgaccatttctcttcactttcaactacttcatctaagattactttaatctctggaagaatttgttgaaaagctttctgccactcatcatctcttaaagtttcttttaaaacttcaatatcaattttagtgtgaaggatttcgtcaagcataattttctggacagcttgagcaataccctgaaatttatcttgagcatcaagtgcaaaagtacatgcaaaggatgccataaaagatataccttcaagcgcagtcactgcaaacaacccttttagaatcactttatggaagtgtaaagggtctttgtccagaagtgagtcacgcacataactcagacgatagtttataccttcatccagtaattcttcaagaacacgattcacagtttttaatcggtcttgtacagcaacattctggttaatctcatctaagattgtttcagggtttttaatacattgtcttacaatctctgagtaagtaagagcatgtaggttttcaatctcagactgcttcataattgcagttgcatagatgtcatcagagataaagggtgcaaaggcaaatgccaagctcttagcaacttgagtgtctgcttcccactgccacttaagaatctcaagcattacacctgacattgatgctgggacactctcaaaatcaagacgtgattgttcaaaagggaactcatcttctgaccagtcttgtgctttttgttgtttataaagttcaaagatttttgggtagtgcttattgagtgagtcaaaagtttttctctcaccacctaaaaagattgggtgctggttaatcatagcgtgatttctcctttctttatcatttctaaggcttgttttctgtctaaaacttcccaattctctttgttaaacatctcataaggtcttgcgtagattttaccatctgctgtagagatgtaagaggctccagtgacccataagtcatcattctgctttatcatgatacctgtgctgctcacatagtacaatgttttgcggggtttgtagagcaagtatattggtcgctcatgtttttctattaaatctttcatggtctctccaaagttatttttagagggtcttctacgaccctcatagttattaaaactaaacaccacaaccctcgcaataagcatcttgcagtgcagatttacctacaccaatgcgactgttaaggtagtacatggttttcatacctaccgagttggcataaatcatgtacttcaaagcttgagccaatgataccttcttagcttttgcgtagtcaacatagaaatctgaagagatagcttgaccagtgaacttttgaacaattgcataacaatcaatcaggtcaaaggtgtcaataccccaagcaatttcatatacatacttcaactcttcataatctggaacaataaacagcacgttaccagttgcagactttttagttaaaataaagtcacgaattgggtacaagccatttgtcgtattagttgccagtgaagaactctcattaggcatgtaagcttctaatacagagtttcggattccaccattttctttgatacgttgtgctaagtcatcccaatcatatcgtagttttgcatcatgcttttcatcaatcttcttgttagctgtctttggaggaacccagccttcaggatacttagtgaacttcatgtactctggaacgccacgctctttagcaagtctcagagaggcttcatgcagatagtaagagtgcatctctgccagttcatgaagtttcgttttacctgctcgtgaagagtagttcacgtagttcttcgcaaggtaatgagccacatttgtaaggccaatcccaacagaacgacgcttctgaacatggttgcgcatcgatggatacggataatccataaggtcaataacggagtcaaccattgcaagagcataataagcaacgtcagcgtattcatcttctgaaattctccctgcaaccaaactagctaggaagcaaagagccacctcaccatcctctttcacagcatcgtctctgtaaaggtctgtctctttctcaaaaccatacactggcaacacaatttccatacaaagatttgacatcttcaatggttctttaaatggtgtatgtgtgtttgcgttgttagtgaagaatggatacacacgacctgtagcataacgctgttgaataaacagcttagcaatttcacgagccttgactcgtctgtgcttaactcctgaatgtactgcgtgaccaactgccatagcaaactcatcagcagatgctgtgtagaacatgtcatagagttttggtgcatctttgtaagagaatagcaaccaatctgtatcatactgaacacactgccagaaataatcgtttgtgccgaatgagtagtccatctcattaatacgtttagaaggaaccgttgtagggtgcttcaaacgcagtaaatcttcaatctgcgggtctagagcagtgtagaagttattagctgaaccaccacgactcttctgtttgtttgcctctacagatgaacgtacaagcttgtaataaggcagtttacccatgtgttcgatagtgttttgacggataccatcaccaatagtgcgagtctccatcagcataccgataccagcttgctttgtagtcatatcataagcaacctttgcagcaataccaagtgattcagcagtatcgtttgccttaatcaagcagcatgacgcataacctgatttagttgccctcaaaccgtttaaataaggcgtaggagcgttaatcttcaggtcagataggtaagtgtacagcttgataacatcttgcagtctacggtgctttggttgcttctcaaaggctttcatagccatacccataaacataaattgtggtgactcaaaaagtcttcccgttttaatatcacggataccatacttgtctctgaactgtttcaagactgcataaccgtaagagatatcttttgagtgcacgatgtaaccttgcaggtattcaagctcttcctgtgagtaatccatcttctcccaaagtcctgctctctccatatttttaacgaaggtaaccagcgtaggaaccttagtaaagcctccaaaggcttctttgtagataattcctagaagtagccgtccagccatgtctgagtactcttgagtttgtttatcaacacaaacatcaatcatagcttggtgcatctcttttgtagtgcaacctccatagacacgtttcatggcttccatagtgacttctgaccagatgattccacgcttatctgcccatgatgcccacttattcagtctttctgggtcaaagcttactactgtaccgtttgattttttaattgtcttaatcatttttgaatcctacagatgaaaagagcctccgaagaggctccctagtttaaatcttgaaaatttgctcattctgccacatatcgtaaaacttatcacttacctttgtgactgaagaggtgtgcatacaattcacgaaccatgatatatcactattcataattatttcaagctgttttgtgacatccacattcatgtcttcaacaacgtaattacctcgcatcttgcacacaactcttccaaacaagattgcacttctgcctcttctgtcgtcacagtacatgactgtgtccccgtgcttaacatcttgtccgatactatcaacacctaatttagcacctgagataatgtcatcataagatagcttttttgctttagacacggtatttctccaagtttctttttagatataaccaaccatagtcagttctttctacacccatgaagagtggagccattacaactttaccaaaagtattcctgtgttgacagatttcaaaagaatactctttctcaatatcaatcccgtatttgtacagaactgcttttaaaacttgttcattatccagaagtgtatctggagtctcaccatacttctcaagtaacgggtcattcataaacaccgtcatagagatattgtagtttgagaagtggctcttctgagccacaccttctttattaatgttctgtgaatccattataaccaaccccttttaaccagcacttcaggttattagcatcataattcagttttgggtatgaggttacatggaactgctcaccatcatagtagacaatatctgcaatccatagtccattctctttacagaaatctttatctgctttagaggtaattggattaacttctacaaaaccatctacacccaaatcctttaagctacatacaatacctttgcagataacgcatgtctcagatactaccacaaaaagttcttggctttcaagttctacaatgtattcaccaagctgaactttagggagattagattgcttcataatcttcccatcggctgcacgaacaattgcataccattctttgccatcaactactgacattctgatgatacactcttgaccagtacgcttctcaatatctgcaagacgttttaaagcttcttcatagttgtctgtgtattttaggtcattgttatggcaaacagcttccatagcaccattatggtcatgttgtgacaggtaaatcaaaccgtcaagaacatattgcaaatctgcctgagcatccagtgtctcaatggggtctttctcttcaattgcttttacaagctcttttgcttcttcaagcatacatagagattgagatttcaaagattcccaatactcattgctgtagggttgcttttgagtgtttccacaacgaagattccagttttttactgattctcttgagttaaacattctgactccttaaaatatctgttaacctttagctctcgtgtttcaatatattccagatgctcacgtagctcttgacgtttaagcattaggtgctgcatttgagattcaacagcttcaacctctttaattattgactctctggcatttgcaagaatgcgctcaagttcttcaatcttgctatcaacttttgctacatgactcacagctttacttttgttaaacattttattctctctcaatagttatcaagcacagtttgctttcattaccttatggattcttttttcagcatcttcataagtttctttagtaataaacttaattgctgcaatattggcattgtagaagagtctgagcttagagtcaatcctttttgtcattacatcgaatttatgttgaaggtttgcttcaccataaactagaccaccttttgtgtggtaggtttgaataatataaaagtcaaaaaattcttttccaaagctctcaatatcttttttaatatactcagaagaagtctcataagtcatccaatcactttccttagtgactaccttcttccgagtcttgccagcaacttttcttttggtcacactattaagctgtttctttccgatataatattgtccggttttcttacagtatactaaatagacaaagccaaaatgtttagtggggtcaacttccccacacaaagatacccaatgaccataggtggggcaattgccaaatcctttaatcttcattcatacacggctcccaattatatttcttaaaagagaaattatcttttggatttctctcttgatatgctacccagaaatgttgttccattaactctaatggtgttttggtaacagtctgtccatcccatgacacataggtgtaagactcttttttagcatagagttcatagatagcatcaagacactctttataggtctctttaccatctaaagcattcatcacagctactttgccagcacctttaaggccgaagtagttgtctgcattatctccagcaacagcctgataacacaaaaatttaaaacctacaccaactgtttttgcagcttttggttttgatttgataggacaatcccagatatcaccaacattattatcagcaataaaaattagtggtgacttttcataagtcatatcaatacaataagtcccttcagcttgtcgaaggtctttgtcaatactcataagagcagccttcttacccatcttttcagctttagcaattacgatggaatcggcttcgaagcctccctttaagagcttgaactctggtcttgacagaagatattcacgacaagcaactaagtgtgttggtgtgacagcatctttacggttaccttgatattggtgctcaagacctttaatgtctttatgtttatgtacacccttctctgttaagtagcctacccaagttctttctttaccaacaaccttaagccattcctgaagaacctgctgagtagccatgatagcttctttttcactcttagcttctttccaagtctgtctttcccattcatcttcatcaaatgtcaggccaagctcttccacaaggattctctggtctgctaaccatcttgcagcatcttttgcattatcaaatggttcagattcttctgctgtgagtttattgacatatttatattttgctttctcaactacacaagcacctttataggcaatgctatcagagtcaataaagacatgtgtaactgaatcgggaagttttgttagtgtatacttctccattgtgactctccatatgaaaaagccccatactaagtacagggctttaaagtaacttttagagattagtcttctgtatcgaagtcttcatcttcttcgtcatctgggtctggcaagtcttcatcgtcaccatcatcagaattgttcgaaggtttgtggtctgttgcgtcttcttcagtgatttcaccattatcttcaacaccatcaagaccaagcatagccagttcgtcttcatccagttcaggttcaccgttagcaccgttaccaccagtgtaaggtacaagagtatcaatgataaactgttcctgaataggttttgtcagaacattgttctcaaaagtgtagaagtgagtagaaagaatcacactaccaaaagaaccgttaccaactgcaatatctggatgaattacatcatagttcttgtcatcttcatgcttatcggatgcttgagctttgattttcttcatcggctgtttaacagctacacgcttaccatttacttcttcaatcagcattacagggaatgactgtttagctgtccatacagcaccatctttataagctgctgcacgacttactttcaagatgtagtaagtgtctgcttcaaaaggtggtttacaaccaaacttctcttcgaagtcatctgcatcaactgcttcagtagtaactttatcccaaccttctgggtttttcttagacttagtaaactctttaaacagcttgttaccatcttctgccagaattgaaacactgtagttgcagtctttgcctgggaatttcttatcaatggatttaccttttcccggacgtggtgaagtgttcaggtaataaaaccaaacatctttcagaaggtaacgcagagtttgacgttcagtaccattgtacttctctaccggagctttcattttaacaactttagacattatttaaacctctatctcaatttatgaagagtaccaattctaatttgttgatactctattgtcaaacattaattactggaagttgtgcttatctttagaagctgctttacgtgcagtttttccagttcttacacgcttctcttcatagtattttgctggtttaccagcagtggcttttaaggaatccccaaaaacttgttcaaatgctttagagtgtttcatgatattctccgatatacttgatattcaaacacattttctttaattataaacagccaaccaatattatgtcgaggtatagtaatagtgactgttatcatactgtgatggaacttttcttctacctcaacgcctccatcacatttcatgtagagcattctatagaacctatcaacctttgtcaaacactcttcctgaaattcatttaaacttttttcttcaaagaagggtatgaacccctctcttttgtaactatcactcagtttcaaacgggcagtcatctgcatcctcacttaatacaggtggaatcgttgagctttgacgctgttcttcagtatagacttcaccagtctcacggtcaaacacttcatcctcataatgaggtaaagagtcgtcataatggtcttcagcttcaccaataccaaactgttgacgaatattttctgctgcaccatcaatgtcaacaccacatccagaagctttgataagacgtcctgtgtctggattgtaccaagtatgaccagcaatacctgttgacttaccatgacgacgacacttagttaacttgatttttgtcaagtttttcttaacagggtctgggtcaaccttgttacgcattaacagaatgttgttcatggaaatctggaaatacgcaccagaacccttaatatcctcttcagagatatctccaccttcagagttagctttctgaccacctgcactcttacgaacgtgacaaacgtttacctgtgcatactggtagcgtttgcaacgacgcaatagttcagacaagacttcctcttcatccgtatcagaacgtgacagagccaatgtaatagggtcaagaataataatcttacagtctaaactgttaacaagatagtcaacaaactccagcaggttatcttggtcaatcgccccttgatggtcaacgatatggatgcgacgaccttttgaaagctctgcgtgtgctccctttaattcatcccaatcccgttcatcataaggaatctcagaaatctgtttgctcaggtggattgcacagagcatttccatcaactcttcataggtatcttctacaggaattacaccgatattataatcagtttctttccaagctgaataaatcatctcacgagtgtaagctgacttacctactgaagatggtgctgcaatagtcgtaatctcacctaaaccgtaaccaccgtaagttagcctgttcaagtctccgaaagattctggaaaaggaatcaatggaatctgaccacgattcttcattgcctcaaaaccgtctgcaaagttcttgataccagcagggcagtaacgaggtgcattgtagatacgctgcttaaatccttccagaactgtatctttctctttatagaactttgtccaccattcattaaggtcttttacaccttctggatactggaataaacgaaccttctcaataggtaggataccagcagcctctttagtggctttagcacctgcttcatcgttatcaaagcacaagtaaatttcatcaaatgatgtaatgtactgatagttatctttgatagacttgatgtttgcacctgatggaacagatacgtgacagtaattcttacgacgagacttgtccttaatcgcaagagaagtcatatagattgctgtcgcacattccatctcaccttcccagatgaataggcggttaccaccttctggagcaatccatgaaccgaacattgccagttcacctttaatatctccaacaccaccagaaaagtcttttaacttaccgcgtaggtgctcttttggatggtcttctgggtaacggtgacgaacacggtagccaacatgctctagcttgccatcttcattgcgtttgtaagttgggtagaaatgcgcatcaatttcaccgtcactatcaatgtcaaccttgatacccaaacgctcaagaacttttgcaggaatcttcctgtcctttaagtccattgcttcaaggttgtcttttacatcgtctaaatccatcccacggaaagtacggtttttattgtctgaaccagtagaataagtgctcacgatttgtcctttatcaaaatcccactctgggaaacctttgttacaactaaagcaagtcatcgaataagaatcatcgtcatgatgatagattgaaccagccactgatgaaccacaacgtggacatgcacaatgaccaacaaactgaccagcctctttcaatttacgacctttagacattagcacctcttcgttgtagttctgccttcaatccattttcaatcttgtccagttcatgaatttcatctgcaatctctttccttcgtgattcaactctcttaagacgttcaatcattacctcattggaaagagatgagagttccactaaacggtggtcaataactttaaaattgtcttttactctcatcttcattctctcttttaaactttaatgatggctcttagcttgttctcaaggtctgtaagagtaccattattatgaataatgtcacgctcatatttggtggatagcccattttctgaaacgtgtgatgaaatcttatccacattgtctctttttacttcaatagtttggtgtgcaaatctactcagccactcagcttcagagtcaaatcttaaatcactgattaagacaaaaccatattgatttctaagtgagcaactttcatagaatctaaccattcttttttcaaggtctttagaccagaacttgtctcccattactttacggacaacttcagtgccccaaatctgttgaatttgtcttgatgagaatttatactttttgctaaaccccagacgtgtcaatagagttggtttagcaaccttcttaagctccatgattaatcgtccggttaactctgacataagcttgaagtccatatggtaacgttcatctctgaaggtgaactccatagcttccgtaactttaaacatcagttcaggatatgacaagtcaaatacctgtggagtctctttagtttcaccatacaggtcattccaagtcaggtcaaatatctttgatgcagacagtttaaggttgtctgcaaaggccattacagcaacattgtagccgtgctcatcctctaagatgttcttcacaatagaacatgaggtgtcttttccagaacgtgcctttccagtaaatgcgataatattactcattttatctccattaattactaaaaagcccccaactaaggaggcttgtaagatttataaagacttagtgcagttgctcagcatactctttttcagccatagctgagatttgcttcacaaaatcatcaccgaagttaatgcgtagtttctcttcaatgattgaagcaccaatgttcaccaaaacatcattgattgcttgcatactaacgccaccagtcatctcttcaatgaactcaatacttacacccatcatctgtgaaagttggattagtgcaacgatattcatcatcgtagagatagctggaatcatcagtgcaactttcacctgaagaggttctatatcagctacagagtcattttcaacagcttcttccaaagactctttagtttgctggataatttctttgattcgtgggtttaattcttctacaccccaatcaagtttttcatatcgtgaaagtttttcttccatgcgcttctcaagagcagccataacagcactagttgatgaaattaacaggtcaattagttcatcgttacctgcgagtagtagcaagtctttttcttcagtggtcatggcaatataatcatttttctgcatctcataaaaaatgaactctgcaagggcatcaacacctacaacgatagatgctaaagcaagtgttttgtcgcaaagcatcatgttaacctgttctgcaaaagcaccgttatcagacttgtcttcaggcaagttatagcttgcaggcataaactgttctgtgtagttgttaccacgaagaatcatagccatgctttctacggcattgattaaaaatgcttcgtcaatacctttctcttcaagcatcttttctacatcgatattcatattatttctctctcagttggttaagtttctttctagaacattttaagttttcggatgaagaaaagtcaagtgtcttttcagaacgtggataatagtgcctatcccaagaagtttcaacatcgttaatcagtgacgctagattacacaggtctgtaccactttgcaacctctttttaagagaatctagtaaagcaactgtgtctttagctttacgtctcgctgtagcaacatctttcatatgctcaaatacagagcattttaagtcatcttcatagttttcagacaactctatttcatgttgtatatcaaccattctcctgtgatggtgagcatattcccgttgagcagcaatgtcaagttcttccaacttttgcaaagctctaacaaagtcagctatgtctgggtgaacaaacattttctgcatgtaagcctcttttaagtaactattaagttttaatcttttatcttaacgtattctatacgttatactttaaagctttttaaaagctattaaataatcttttaagacttttaaagtatctgtatagttaaactgttaagtaaccttttaagtaaaaacccacttcgcaaagattaacaccttgtcaagtgcattgtcaacttgctttttataattttttgcagtaatgtatgaggttaatgattttagagggagtaaaaatggaaaacgtagattttaaaaacttacatttggttggtgatacagaaactgatggtttactccttgagttcactaaagttcacgtaatggcttttgcagactataaatctgatgatgaagagcctcctgtatgggtctttacagatgaacctatcctcggtcacaagtataccaagtacattaagggtggcttacgtgaaggtattgagtttgcgttaaaggcaaaacgtctttgcattcataatggtctaggttatgactggtgggttttcaatcacattgcaccggatttatggaactttgataatccaaagtgtaagccgtggagtaatttctttcaggattctcttatccagtctcgtgttcagtggatggatagaccaactccaaagggttataaaggtgctcatggcttggctgcatggggtgctcgtgttggtgttcgtaaaccagagattgaacattggggtgtgtggaatgcagaaatcttcactcgtgttgtagaagatatccgtattaacgccaaaactaaacgggcacttgataatgagtatctcaagcttaagaagtgtggcatagacacttatgaaacctacatgcgagctaaagaaacatctttctggatgagtcaacaagctatcaatggttggaaagctgataaagagcttatggagttccatgtaaaggaacttgacaagttgactaatgagcttgcttcagaggttgaaccgcatctacctccaactattaagaccaaaggtaaagtcactggagaagagtttgcaaaagcttggaatgagtatgttgaaacatttggtcatgcagatggactgaagagaattaccaagtaccctaagacaaagtaccgtcagcaggtacgtaacggtgagatgcagacatatgaaatcaagccatttggtaagccaactacaaagatttttaacattgaaaagagaaattgctatacaccaaccaactctgtaactggtgaagagtacaaggaaggttttgtagcaatgaaggatgctcgtgcaatttgcaacgagttgaatgcaaagattggtaagaaatgcaaagactggaagccagtaaaaacagtcaaaactgtgaagtactacaacagtcatgttgttaaccactttgaacttgagtcaagtcgctatacaggtttgattgatgcaccatatacaccaattgagtttgaagtttctcgtatgactcaggtagcagttgttaaagactacttgaaatcagttggttggattccagatgactggaactacaagaaagactctgatggtcgccctgtcaaagtttgtcgtttcaaagacaataaaaagatgattacaaagcatcctaagtggcaggaaatggttgagcggtgtggtttgagttatgttgaacacgaaggcgtccagtacattgagcataactggtctgtgaagaagtacacagatttgcttgagccttgcttaatccgtacttcaccaaaacttactgaatcatcttacgatacgattgaaggtgagcttggacagaagattgctaaatactacactttgatgcaccgacgcagaactattgagaactcaaaggatgatgaaaaaggttggttgaaccagattcgtcctgatggtcgccttagtgctggtgcaatggtgtttggtacttcaactggacgtatgacacagtatggtattgtaaacgtaccgtctggtgctgctgtctatggggaaccaatgagggcagtgtggatttgtgaggaaggtactaacgttgtctctgtagacatgaactcagcccagctagttcttctttgtaactttatgggtgataaagacttcaccaaagcggtaacgcaaggtaaagaagaaattgagttcattcgtcaagaagatggacgctattactgtaaacactttgatgagtacctcaacccagagattgataagtaccttcgctatgactctgagaatgacctgtacgttgtctattcagggactgatgcacatacactgaacagtatttactttaacttgaacgatgagcaggacatcttgacttgtcgagctactcaggatgagaatcttcttcatgagattagcaagggtcgtaagaaagctaagaatggtatctatgcactgctgttcggtgcaggtgatgagaagtttgctaagacgattaaagctgcaactactcaggaaggtgcgctgactaaacagacttactttattcgtttgcctaaaattaaaaagctgctagatgacttggaagctgactacaaagcaactaaaaaggcacttgaagaggtgtttggtaagactgctgcaatctctaaagggggttttgtaaaggttgctggagcttggttgtggtgtaaatctccgcataagctgttgaattatttgctcatgggttcagaggctcagattcaaaatgaggcaattaaccttgcttgtagaagagcatgtgaagaagggttgacaaaattaaatggacgaaaaccagcaattggtgctaggcttttgctggcataccacgatgaaaacagttgggaatgcccagaaagtatgactcaagaagttaaagccataactgactggatgtatggtcaggcatctaagaatttaggtttgaagagtgagacgcttgtaactggcacaggcaaggttggtaagagctggttggaagtacattgatggtgttgaaatgattacagaaattcgtcttaaggagctattggactacgaccccgaaacaggggtctttacttggaagtttagagaaggtaatgcaaactttaactctagatttggaggtaagagggctggaaactacagaacaaatactgatggacacaagtcagttcagttgctgattgatggaaggggttaccaagcaaatcgtttagttatcttgtatatggatggatatctacctgataaaaccttacaggttgaccataagaatggagacggttgggacaataggtacttgaatttaagggtttgtacagcttcacaaaactcttgcaatcggtcaagagagtccccatctgggttgccaaaaggtgtacagaagataagtaaaaggtttcgagcaatgatacgtttacaaggtaaaaactatcatcttggtatgtttgacacacctgaagaagcccataaagcttactgtgaagctgctattaaactccacggagagtttgcaaaactaagttgacaaggtgctcatggaagagtaccttatactatatcttatataggagggcttatgagccaccgtggaagaacccatgcagcgatgatgaaaggtgcttcaaaagagactatcaagaatcgtaagcagaagttgtttgagaggatgaacaggttaattgacaattcatctctttcaggttctgagaaggttttcttgaaaggtaaccttaaaagcattgcacaagaacttattgatattgagtattggaggcatcaaaaatgacacttgcagacgttattcagcaacttcacgacaactgctatactccagagttgattcaggagatgtgtattgtagtgatgcctagcaagttcgtaaaagcctttaacagtgacactttaaggtctgcacacattcttattgttgaagggaagattgcaaaagaccgtactggagtactcaaaggtgaacgtattgatattctggagttgctatgaagaaaatgtacagtctctgggggagggttggtaaaggttttgactggacacttcttcgttcaaacgttaaacgtagtgaattaccagaactcatcactcactatttaaaaacatacagagaggtagattatcgtgaacaataaggttaagagttgtgtgaaagcaatggttgcacttggagtaatttttctggctggctgtaacccatcttatgaaaacaaagatgcctcttacagcctccctccagagatgcaagactgcaaaatctacaaactcaatggggatgctataagcagggatattgttgttgtcagatgcccaaactctcaaacaacaacatcttatagatatggcaaaaatggtcaatcacacactactgttattgatggatgagactaatatgcaagttttagtacactatatctactgctacgatgttgtttattccactgcaaccgtggcccaacgtaacccaatcgtaccgcgagaaggtgaattggttcgcattgagggttggacttacactgtggaaagcatcattcataagtttgatgttgctggtgatgttcaagttatcgacgtggaaattggtggtaagagaaaatgaaatctaagcaaacaatgacagatgcaatcttcacagtacacagtttcgaaaggttgcacattaaagatgtaaaaaatacaccaaaatgcgttgtacatttcattaaaagacgtagtgagaggtcttatataaaatctgacacaggcgagagtacaaatgggtaaagataataaatttcagaacgcagttcttacagaagatggtgagcttgaaacattcattcttcgtgttgatggtaagttattccggtgtcgttgtgggtcaaactgtttccataaaccagataaaaacgacttagagctttacgcatgtaatgcctgcaacacttggtatcactcagaggttaaaaatgacaattctgtacaaacaaaataaagatggttccttcaacgtctggtcatgtgttgctgtaggtgacaaagttatcacaacctatggtaaagaaaatggcaagatgatgtttgaagagtacacagcagagcctaagaacatcggtaaaaagaatgagcgtaatgctgaacagcaagctctctttgaagttgctgctaagtataaaaagcaagttgaccgcaaaggttatgcttacacaaaagattctgcacagaatactgagaaggtaggtgtacagcttgctcatgatgctgcaaaggttagccatgcaaagtatctgaagttccctgctgatgctcaaccgaaacttgatggtgtccgttgtaggatttcaaggcacttgagtattggcagtgtatttacagcatattctcgtgagaatactgtttacaaaatccctactgaactaatacctgacattatggcaatgttaaggctccacaaagatgttgatgaatttgatggagagatttatgctcatgggtgggacttagaagatatcgtctccatgattaaaaatgaagacaatcctgacagacacttgctcaagttttactggtacgatatctgtgacagtactaagacgtggcctgagcgtagagatattattgagacttcaccattgaatgactttagagacggctgtaaagttgttcctgttaagtctcgtcgtgtaaattcttgggaagagtttgatgaagctcacgataagtgggttgaagctaagtttgaaggtgcaatgtaccgttcaatctctgaagactccttctatgagtgttgtcaccgttcatacttcttgattaagcacaagaagatgcacactgaagagtttaaagtgactggtgtaaagactgataagcgtggtcatggcaagttcgttgtagagactcttcctaacgtctttgtagatgtctcatggaagactactcatgagaagaaacagtatcttgctgagcatcctgaagagtttatcgggaagcctttaacggttcagttccagaagatgactcgtaagggttctttacagttccctgtcgggctagctattagggattatgagtaaactatgttcagtgcagtcattctgtttatactggttgtctttgtattgtcatacattgcaagtaagcttttggacacatcttttgcaatgggtgttttgttcacaatcttctgttttgtaacacatatagctatcaggacttttatataaaaagttgttgacatagaaaatttggtgagtatactgagcagcataaaccaacgggtactcaccagcatcacttaagagtcttctaagagggtttttaagtgatgtgaggtatggcagtgttctgttcggtacggtgtggcacggtaatgttaggtctggtctggtcaggtcgggtcaggtgcggtacagtatgggtagttagtctcagctacattaaaatgagacttacctttttaaaaggtctttgaagagggtcttttaataaggcggggtgcggctcggtctggttgtgtgaggttcggtttggttaggtaaggtatgggtggatggtagtagccacgttaaaaatctaccaagtttctaaagagtcttctgttgagggttctttacaaacaacttaacaatcaactaaagtgtggagctaaatgctatgaaactgttaaatatcaaaatcactggtactcgccctttcctgagccacgctgatacactgtcagacccattaaaccctctgacaaaatatcacaagtctctgtctagtaaacgtaaaaagactgacgaagactatgcgctcttagcagaaagtcaactggtaacctcttgttactacgatgagcagctaggttttgttatgaacggtgagatgattgaggcttgtatcaagtctggtgcaaaactcaacaaacttggtaaggtgattgaccgagccattatgctgacagatgtagtcttcccaatgactatcaagaactgcccagcaaacccacaagaacttgctaagaatccagactttatctatgctaaatctgttaagattggcacagcacgagttatgagctaccgtccaatcttccgtgactggtctgtagagtttggtttgatgttcgatgaagagcaaatcaccaaagaagaactcctgatggttctggaaaatgctggcaacctttgtggtgtaggtgattggcgtccacgctttggtcgtttttctgtagaagttatttcagaaggtaacgtttaattatgaatacaaaagcattagcagcaaagtttagttatggtgacactgtatcacactctgagatggacaccttcttaggtattgtgaagccaacttatcaaggtgacattgttaagtacgaagatgaaatgaaggcttatgctcttacacgtctaaaccgacttgagaagtttattgagaagcttcttaaagaagagaagatttatctggttgcttcaatgggtgttggttatcgtgtggttgaacctaagcatcaagcaactattgcaaaacgtaaaatgtctggtaaaattggtcgtgctttaaagcaagctactcaagcaattgagaatgtgaacactatggcacttagccaccaagaacgttcacgactaattgaacagcaaaaccacttagctgctatgaaagctaacattaacaagcaacgcagaaaacctttctaagttgactaggtagcctcttcggaggctcctttttaaaaggtctttaagagggtcttttaacaaggtattgtatggtgtagtttggttaggtatggttaggtgtggtaaggtaaggtatggaaggatggcagtagccttataaaaaatctgccaaaataagctataaaatctgttgacaagtcaggtgttatagcttatttttatactaaatgtaatacaaaattcaatataactttgaggtcattatgaaaaagattttattagctgctgcaatggttatggcaatgaatttaccagtcaatgcaacagaacttccaaatgtggacttatcaggtgttccagaagacacttgtcagattgttaaaggtgttgccctatctaaaggtgaactacttaaaccaatctctgaagagtctttaacagagatgactgataaggtaactgactatcagtatcgtgttcttgcagagtatttcctgcaatctgcaaatattaaagagaagcaccctgatgatattgatgtacaggctatgctcaatcatcgtatccagtttaaagaagatttgatgcaaaaagctatgtatggtgttgagtatttcttagaaaacagaagctgcacaggtatttgatatggctcttaaaaagttacatcccagaagcggttatggtaagataattgacgatacagacggctttacagtctttacagttatctgtcaagatgattcacagattgaaaaggctcttgacgattatcttaacgatgaacgtgaaaaggttagggctacaaacatagactcattaattgacacttcacgcaaacggaagaagaaagatgaatgaggtttttgacccttatgccccacaagatgattgggaggctgatagagaggctgaaatggagagttatatttgtccaatggatgtagacgaaatgagagacttcgttgcacatcgttttaagagagagattaaatccagaggtctttctcaagagcaagttgctaaaatttgtggtatctctcaggctcgtgtatccaacataatccatctcactggtaacgtctcccttgagtatatgttggaagtatgtgaaaaatttggtgttaatttcaatttaaggttggcagattaatatgaaacgtgaaaacattatccactctgaaaacttcgcattaggcttttatggcgtacctactcaccttgaaaaatattatggtgtgaagattctctccaatctcattatggcttacaaagatggtaagattaagcatactgagaagaaacgtgtcatgggctatatggctgtaggttcagcaatctcgaacattaagctggaaacaactagcagtcagattgtgaaagaccacttcatcaaagagctttaccacaatcttgatggtgtagatgttcaggctgtttggctggatgttgatggtcataactacacaagttttgttttcaaaaacgatgacatcaagtgtctgttcccataataggtgattaactatgattgatatattcttacaagatgcccatgcagatttccttaaaacgatgcttaaaaagtttatggcttcacagtatgagaatgaagcatcttttaaaatagttacatgtggcgatgaagctggttttgttgagattgaacatgaaggtactggaaagactgtttgtaagctacctgatagcatgttctctaaaacgttcttaacaaagactagtataaatgttaagcttgttcctcagattgaaacatactctggtacagattaccctaaaggcttcaagtcactgatgaaacacttcttagatgactttgtgagtaatcttctaagtgaggtaacagaaagccgtacaatattaactgtagagaatatagggaacactatcagggttacttctgaccgatattctatgagcctcttcgactttgtacctaagaactttgatggtattctggatgaagaagatgactgtgtagactttatattggttcttgaaccagtttttgaggttaaatagatgaaaattgaacactgctatgagtctgatggaacacctatccgttgtccacattgcgggtgtacagacttacaaggtgaggtaagtgaaatagtcaacggtcatattgctgaagaaagtacccgatgcacagggtgtaatgaaattatcgctttctgggcttatggttcataccaaccctctccacattttatctaccatcgtagtaaagttgtgaagagtgttatcaactggttcattaagaaaggatttacaaaatgattaaattaatctttgcaagtggtgaaaatggtgagtttggtactccaactggtatgccgtggcctcgacataaacaggacatgcaagagtttaagagactcactaaaaataacttagtagtcatgggtaatgagacttttaagactctgggtagtaaacctctaccagaacgtgcaagcctaatcttaacaaattctgtaccatacttaggcatagactttggcaaagatgatgtaatgtatgctaaagccagtaaagagtcatttggagcatttttgaagtatcttgatagctctattgatgaagatgtctttgtaattggtggtgcaggtgtccttgtcaatgctttaccgtatgctggtgtggtgttccatacagtcttccataaagttactgaagaggccactgtgcatttaccttttgaaaacttctttgagaagctgtatgataaccgtgtatttacaaaggtacagtcaaaaccatcagaggatggtaaagcaacttttgaaatttatgttccacaagtaaaaggacacttttgatatgtcacaagcagattcaagttacaaaaatatcctgaaccatgttttatccgttggtgaactgcgtactacacgaactggagatgttatctctgcatttgctccacctcagtttcgttttgatatgcgaactggtttcccgctcttaacatctaaacaggtgtttacacggcaagtcattggggaagctttatggttcctgaatggtgagaataaacttggtgaactccgttatcgcacttggggtgaaaatgatggagaacgttggactatctggtcagatgattttaaacgttggttaagctctaactattcttctgagcaagactggttagaagatgcaggtgggagaatctacggggttcagtggagaagctttgaaggtcataatggttgtgttgtagaccagttagaaaccttagtaacgaagatgaaaggtgatatcacagaccgttacatgcttgttaatgcttggaatgcagcagatattgcagcaaactcaatggctttagcaccttgtcatgttctgtttcagatttatatcaccaacgaaggtgaagttgacttgcaatggtatcagcgttctgtagacacctttttagggcttccatttaatattgcgtcttatggttttattctggaagttctttgtaagatgactggatacactccacggtacttgataggtgtctttggagatactcagatttatcagaaccatatgaagcaggtttatgaactgatgaacaatgaagagttccatgcacctacttttgagattggtgtacagcttaacactttaagtgacttaaaacatcttactgcaagtgactttattggtggaattaacaactaccaacatgcagggaagattgaagcacctctgtcagtaggcaagtaaaacaaaaaaggctcccgtaaaaaggagccttaaactttatttttcagtattctttgtgttcttttcagtaatagcttgcaaggctgatactgattgagccagattattcacactgtcagagaatttatcaagagttttggtaagttttgcattctcacccttaacgttctctaactgaactttctggttctccatccctagctgaatcagtctcatgtcagactgtaaatcacgaatagctgaatagttacttttggaataattatctagctgctgtaactttgttgtgacagacacttcttgtttaccacttgaaacctgcatcgtggtaaacatcccaataacactaaaaataccaactacaattgcaccaatattatttttaaaagcttcctctagccacttcatttatttctcccccttaaaagctttttctaagttatctacgaactcatcatcaataggtgtgtctgttttactcgcaaggtatcttgcaagcttaaagaacactttctcaatcatgtattcacttagaagggataaaatgagtttccagaagaagctacctagattttttagaagaattgctaggattgtaggcatttaatcacctcatcagccaagatggtgagaatacccataaagaatattaacaccatcttaacaatcagtcaacaagggattaagcagttcttacccaagccattaacttgtagaactggttagtaacactaaatgccgaaccagaacctgtgctaccagtgttaccactaactgtgtggctatgagcaccaatacctacagagtgggaatggtcaccagcaccgcttgtagtaccagaccacgtgtgtgtatggttaccagttgtgttagtgttagggaacttgttatctcttctatcaagccagtcaagagttcttgtcttgctgttgctaacagttgtgtaaccatactgagcatcaccaccattaactaataacagacctaagtggtgagcgtggttgccagcagcacttgttgtaccacttacagagtgagaatgaccaccagtactgttagttcccttcgtaccataatcaaaagatgaagtggtagcagagaaactatgagtgtgtgatggcaagttaccaacagacaacgtcacagaatctgaaccaccagttgtagcaacatctgaaccgtttgctgctgcaattctgatagttctaccaacaccattgttcaggtacgtccaagttaacccaggaagtgctgtattagggtcaacattactgttaaaccacgttacaatacctactggatagattttattaaggtctgtagagtcactaattgctgttgcaattttctggtcagtttcagctttagtgtatgcaccaatctctgaaggggttggtttttgtgcttccgtgtaaactttagaccaattaacttcgaagccataggcatctcttgatgttctataccacatcccaccatttttaaacgaaaactttaattgtgcagatggtgtagaaccagtccctaaaaacatgtgatatacaagtgaagaagactgtccagtggtgttagtaaccttataaagacctgtttttgcatcccatgcaacaccatcaccaccatctgcttcagaagccgaaccagtgatgcttgcaagcatatatcttgcgtttgcggcagattgggtatagtatctagcatctaagttagagaagtcagaaggttgcacctgtccagtgattctgactgttttgttcagtaagaagtcattcaccatgaaaatggtagtagcagtcctatcattgtggataacgaaactttctggtttttgttccccgttaccgatgtaccaccttctaacattatcagcattaaagccagcaaagtataactggctatcttgtgtagtattctttagctgtaacaataagccattttgattaataatctgtgcagacctgaaagtgtttacatcacttagtttagcaagattactcaaagtagctgctggaatgtatcgagaatcaatattagtccaatcagaaggttgcacctgtccagtgattctgactgttttgttgactgtcaccaaattctctaaaatagcaattgaaacgtcagactttacattcttcaatacaagattatttgtacccctattatcattacctagataccatctgttagtaccatctgcatcttgaccacgaagatagagtggagcaccttgagtgatatttttaataatgagcgcttcattgtcagagaggatagcttgagtacctctaaaggtattattcacggctagtcttgcataccttgcgtcattctcttcattagttctcatcccaagttcattagggcttggcttattcaaagtatgataaacagttgccgaccttgaagcgtctgcaatagttagtttaaggccgtttgcgttgattttaaaagtctttaaaacatcaccaacagtaatctcagaagagcctgtggggtcgaatacagccttgccaccgtaaagtagcttaacaattcctaagtcacccgtcatagtgctaccagcaatctgaacaaatctttcaagcttaaaagatgctaagaaatcttgataggtcattcgacggtcttcatcacccagcattttaggtctctttttaactctgacatgaagaaggtcatctgaacggattgtgtcgattgagtttagctcactcaatttgtaatctgccattataaattttcctcttaaaaggggctataaagcccctgtaaagaaattaagctgttctctgccatacatacagtacgaaggatggctgttcaatattaactgcctgacctccaccaacactatttgtattgccactatgtgtatgttcagaagaagaaactgttacagtgccactatgcgtatgtgaaccaataccaactgtatgactgtgagcaccaataccaaccgtgtggctgtggtcacctgatgcaccagatgtgacgttaaagctgtgtgagtgcgcaccatcactagaagtccttgatgtccttcttgcaccaccaccatcagagtcagccacagcattaccagtgccatcattttctctaggatacacatcatggttgtgagtaccattggtgctagtgttacctgacacactgtgtgtatggttaccagttgtgttagtagcttttgtcccatagtcaaaagagtttgtagtcttagtcccataatcaaaagctgaaattgacacagttgcattatgagtgtgaccaccaccgctaagagacacagagtgggagtgctgaggcatgttattaactgacaaagtgacagttgaagcgccaaatacagaacctgctggtcttgtatcagagtcatagccaaccaatgccctgccttttgaaactaactcccaagtacctccacaaattaagtatgtggaagggtttgcagagttcatagaaagatggatagtacctactggataagaagcctgaacagccttgtacaagttatttactgctcttgctgtagcatacttatctgcatcttcgttatacagattagatgttgtccagttctgaacattacttaaaccaacctgtgccttagttgtattgtgtgggttactcttgtccttgatatgttgctggacaaggttattaacctcttctgaagacataatctgtagatttgctcttgcctcagctacattaacaatatctgataagttatttgcagcgactaactgaagagcattaataacattatctaaaccaatttgtgttttagtaacaccatgagggttatttcttaggcttgcgtgtggagcaagtaattgctcaagagtacacctcttatcctcaataccctgcttaagatggaagatatcactaaggtcaattggtaaggatgcttgaggcaaggcactaatttgaatttcacctactgccattattaagctcctacaaattcataagtataaagattttttgtacttgttgatgcagtacctgtttcggtcttaataagcttccagccattagccaccaaatctggttgcgcagtggcaaaagaccttacctcaccaacagtaccatttgctttcttcaggagatagtttaagatataattaaaccattggcgacccattggttcacctcttaataaaccagtcgcctgaatttctggtggtggtaatacttttagctggttaccatcagcatctacttcatctgtagaccaatttaaaaatgccattaagaacttccttcttgctgtgatttatcttttctacctttgatgatttgagctacttcagccataacaccataatcaccacctgctacagtttctttaccaacgatgtagttgtctgtagcattataatttttattaaccttcaagtaatctactgagccactattagccgttctatcaatcttgaaataagcatctcttacaccagcatctgctaaactccctagtaagttcttctctaaagaacctcctgtattgttggtaaccagacccttgttagcatctgtaacaagccagttatctttatcatcaacaattgctaaagcagagtcagcaacctctacaggtgtccaagcagtaccattcagggttacatctcttagaatgactgctgaaccaatagttgttgcagcaatttttgctaatgtgtatgctgtgtcaacaacgttatttcttgtgttaactctaaccacaataccagcagtcataggtgtaatatgttcaaaaagctgtgaaaatgttgcatcatacagagtcatgatagcattctgtaaaaatgttggggttgtatcagaacgtcttagaaaaatctgaatataaagaattgctctatatgtttcatcatcagcaccaagtggtcgtggtactttaattaatgcaccgatgttgtcaagttgctgtccaatagccttcctgatattcctttcagtgtgcatctgccatgaaacatcttccaatgtttgtagctcatcagtgatagctttcagcaaactcgtatagatgaatttctctttaaactgtgtaacagtcctttcatcaagagtcttgtaataaacatcatcaattttctgaaacattatcactccttagtaatggtgtacttgctactttcccatacagtgtattggtcaccatcaacagtaattcttgctgtagtgtactgtccatcactaggtggtactgactggctattggatagtgctactttgatttcattaatctcgatacctttaatgacattataaatatacccatagattctattagggataacatcattaccaactttcaaagttctaccataagcgttaataccttgaataatactgtctctgatatcttcttctggaattgtcaagctttcttcattatatagagagtatgatacttttacaaaagcatacttaggtgttggcctactgaagtaaatattatgagatagtccacctaagtcataagctgtcccaaagatagccccataagctctaataccagcaggtttagtgtcccagattgcttgagcaacattatcattttgaccaccaactacaacaatcttgaaagattttggtgggagtccttctgagcttgtctcttcagtatcattttcaacacctgaagcatctgatacgccctgaaccctcttaacagcagctacgattgcatccagagtacctacaccagtaactgacagggattctaaatatctctgacgaagttctgtatcggtctcttcatttctacctgttgtcaggccataacggttatatacgctatcaagaccatctacagttgtttcaatttcgataagtgtcccagctaatgcaggaattgcaccaacttcctcagcaacaacatcatggatagttgtaatttttgtgaatgtgaggaatgtggtagcagtcactaccatagggttggttcttgcaataatgtcgccttcatctttataaactcgtaatgctgaaccatcattgatgacttcagcttttgctacaataccaccattaattgcattagcaagctcagttaatagtactgtgattgtgtctgaagattttggctgataagagaaaataacgttatcaataataataacataatttgcatcagttcgtaaagagttaacttcaagaatagcctcaacacagtatgaaggggttaatgtaatgtttgaaactggatagaagatattcccagcagtacttcttaatctggttgtagacggaattgttgcacctgttgttccagtaaactctacttgaccccttgtagcttgagcaacatatctatacacagcgtttaaagctgtaatatcatcaaggttaaaaccttcagctttatcaatcgttccaccatcatagatttctgatagaatttcatgagtgtctgctaaagaccttgcaattgaagctagaaagagacctaactgactatcctcagaaacgtcaaggtttggtgaaatatctctaagaagccttgatttgatattatcaaaaatttcctgatatcttagagtttgtaatcctgttgtagttaatcctgccattagatattaacctcttgcgtaatgtctgttaaaatatctgttgtagtagttgcatcaaaattaacagttacttttctctgagcattatccattgaagaagaatagttatagatgttagatacatctcttgtttcaacaaggtaggctttcatgtaattatcaaagatagaagttttctgtttaaatttggcaagttgtaaatatgggaacccagcagatgtattaaagaaaacttcaccagcccttaaaaggcatctaatatgaagtctttgagcaacctgagtagctttatcatcttctgggataattctaatttggttaccagtaatctttaaatctccatgagccacatacactgaatctgaacctaaagtggcaacatagtcaccacctagatttaatgcaaagtctgttttcattattgtgcctctgtagtatcagcctcaccagcagggtctgtccagtaataatggtgcgtgtgttcattaaagctcacaccagtcgtgtcactgataaaatctgagccgtgtacttcttctgttacgtacaagtttttagaaatgtgtacatcaccttcaaagtagaagttaccatcatcagtaactcttaacacagagtcaccgaaatgaagtctaactgctgttgggtctggtttaaaattctgtgttcttgtgcagatgcctacgaaagctacacagtctgaaatatcatgtgtccttctcatgtttgtttccatctgaacattcttgtcattgacaacgaagtcatctaaaggtaacattgagaaagctaaccagcatctgtcattagtttttacggggaatgttaaagatgccccaccaccacttggaaattgaacaggtacaccagtaatctctggcataggtaaaccgttaatagagtaaagtggcttaacagtggctgtttgagtctttgaatcgaaagactgaataatggctggtaatccagtatacagttcttttctaaattcatcaagacattctgaaacatacccagacattctagtaactggtgacttcattattccaccttctctaaatctagttcagttgtccaagcaccaccagtaaagtcaagattgtgagaaagaccttttactcgatactgaccttcaaaatcttcactttccctaatagtgatgttatcacccatcttaattctcccatctaaatggattttgcaacgaactccagttttaactttaataactgtcttattctcttttttcagaacctttctagttcttctgtagtagccttgcaaagaatcaataacgttatatgggtaaatttcccaagaaagttgtctagccttagcgttaaaaggaactactcggatttgcttgttaaatgtataccaacgtagactactttcttcacaaacctttgtaagtgcctctgcaacacttccccaaacactaaaaccattcttgtaagtgtaactatcaatacttgaaaggtcttcatcaataagtgagaaacctagtctgttgactaaatctctaatcacacttttacgcgttgtccctgctttataagaaattgatgtcttaatcgtggttctttccattttatcattggaacagataacctttgtaatcatatcaacaccacgcttatatgtataagcatattcaatagtgcctagatagattaatgggaggttatcatattcaataataaggtcgccatttgcgtcccttttaaaaccagtagtgtaacctgctctaagcataactgttgcaccaacggttttgaatttggctctcatctctttattaaggttgtagatttcaaaagtggtatcatcagaggttactttattcttctgagacgtataagacacattacaagtaaattgtaagttgtcaaaatagtccatttgcatagaatctttagcatggcttgtaggtttatcattaaaggctgtagtttcactacctacagccaattgatagcacctaaaagaagccccagcagtgctatcttttacagacattacaagttctccattaatctcatatcttcttgagtgtaataattaagctcaaatgccttttctcttccgaagttatttctggtaggctgtaaatcagtaccatacattcgttcaacaaaaagctctccagctaatgaaggaattacatagcgtcctgtgattgattggtctgcaaggcatttcttttcagataataatacattaccatcaacatcagatagcgtcaagaaccatctgtcaagcctctctttatactttaattcaattacaaagacagtgccatccagagttacagtttgtgtagaccatcctgtatcaggaacaggaatatattgtgacattaataagtcccctttttattcggattcactgaatgcttttgtaatgcttttccatctccagcagttctgtttaatgctgctccggcatttttctcagcctcttcactgaatgtagtaacaccttttctggtttttgcagacatggaacattttgcaagggcattatcttcagcactagtaagttcccttactccattggcatcaaggtcgaataataactgacagtttaatttcccattacctagacttgttgtggtattccctgtattctttttactggtagcaccaccatcattcgtggtagcggtctttccagttgcagcagaaatatcagtttgtcccacgatagctttaaagttaatttcctgaaaagttagctggattcttagaccatttgaaataccaacatctttagaggctttaaaacttgtgataatggaatcatcaattttaattccgtctttacagatgactgaaataatttgcttctggtcacgccagctttcaagagtgtcgatgaagttttctactaattgaccctgacgagttaataataagcttccttcatagccaactacaacgacaccactaatagtgattgttctgggtgctctttgcacattatctgtgacggtttgccctgattgcatgttctgtgtagttacctgcatagggctgtcaaattccatattttcagttgctgataaggttaagaaggcatctacattatctcttaagtggaaatagatgccgtctttgccactatatttgatttgcatattagaatcccataacattattcttcctctggatagcttgaacttagaagaatgtcttcttgattcttgtcagtaatatccaccatcttagtagcaatttgtttaccatcaagattgaaagtaacattcagggtttgtttagtctgcataggtaaaccagaaggtgtcatcatcattggtgtctggttaaacttattggcaaaattatcaatagatgttgatagcttctccatgataatctcccaattagatagaccattatcaattaactttctgttgccttcaacgtcttgagtgtactgtgcaaactgaagttgaccattctcatcaaagaacattggcctttttgggtttgtaatatttgcaacagcattttcaaatggttttggtaatgtaacttcactgtagtttttagcagcatttgggtctgtagagcctcttagcattaatgctgaaccaacagtaccaagtgccattctcgttgctgtaactccacctgctgctgcggctgcttctccggctgctgctgtacctgctgcactaacaccaagtctttgtaagattttaccaaagataccaccaccaaccaaaccacttaggagcttgactgcttttgatactacagcaactgcgcctccaattgtgacaactgttcctagaaattcaccagcacttttgataagcttttgctggctgttgtcaaggtctttataccaagctcttgcatagtagtatagtgcagatgttctgtacatgaagtctgtaatgaagtcaagtagattactagcgccttttaacaggttcccaatcacaagacctaaagcctgcgtgctacccatagaaccttgcaagaacattgcaacggagttagataactgtgaaatgccctcactagaattgttaaacagtgctacaagtgtgttatcccacatagccttcgcttgacccattgatgtagcagtctgcttggacacagcattcataccacctgcttgcttgacaagttcagccattctttcagatactttaggaagaacgtcttgagcaagaagtttaccgtcttgcatcatcttatcaagttcttgtggggtcttaccaatagcatcagcgaatagctgcacagcacctgctaaacggtcacctaactgtccacgaagttcttcagcctgaactttaccttttgacgccatctgctggaatgcaaccatgatacctttcaagtcttcatcagtagcacccctgatacgggcaaacattgcagcattcttatagaactcttgagtaccctgaaagccaagtgttggttgagcaccagcagcaaagtttgagtactgcttcatggtatctgtgtagttctgaccaatttggtgtgcgaatgatgcagcgaacattctagcttgctgagtgtctgctccaaagatagctgtagaggctaattgtgcagattgtctttttacaccagcttcaatagttttttgtgagagttccagtaaagcataagctgaaacaaatccaccaactaattgacgtaatgatgcgttagctctatcctgtagccaagctgattctttaactgattttagtctagcattttctgcaataacccaacgtttggttacgtcgatgagctttttaacttccatctcatactcaccaaccttaccagtacctttatatctgttatagatattttgcaagcttcctctgaaagaggctgccatttggttaccttgaccaccgattgtttccagtctacgggttaaccctgaatagaagttgttgttaaacattctttccatttgtctctgagcaacatctactctcggacctctgggtgctccaccaccaacaggagggatactctgtccacctctccctctccctgtcttgatagtgattttaccgtcaaccttcatagcatctcttaatgacttgttaataccttttgcagtcttttttgcctgagtttcaagtttcttaagagatttaacaccttgtgaatcaaggttcaaggaactgttgagtgctttattgattctgcccgaagcagactgagcattttttacaattctattaagtgcttcctgagaacttttattaggtttcacatcaaaggctttattgatatttcgctcaatacgctgagcagcttgcatagacattttctcaactctttgcaagcccttaacaaccttttcactgaaaccaagttccacaatgaagctatcaactgtatattgtgccattacatttttcctgctcttctaagttcgttgtaagcaatttcctctttatacgacctctgaatttcaagaaattgtctcaatgataataaatcagagaatgtcatagcaaagagttggtcaagtgtttctttacacccttccataccataaatagcaagcacaaatttcatctcgtctgcttcttcataggttgcctctacagcagcatcagttagtggtgtctgtagagtattacccatgtttactgagaagttaggcttttgaaaatgcttgcttcgaaaaaacttccgaagtttgcctccagcgcaaatgctaagtaatcaataaactcaccgtagtttgcttggaagtatgtatcaatattgagtgggaagtcatcaacagttgccccttgaaataacagggtagccatttcttcaaggttaatttcttcaattctgtcaaaacaagcttcaacaaggtctttaaatggaaccattggagcttctttcttatctttatcagtcagacttgatagcatctgtgcaaatgttggaacaacaattttacccagcttcatagacatcttaatcccatctcttgccccaagcagaacaatatttactttcttaccattaattactctagattctgttttcattgtgattccttaatacttttaaaagaaacaaaaaaggggaagaccttttaaagtctcccccttataggatttattaaacacttgacgctggaattgtagaagtgtagtctagcttctcacaaccaaaaatccaagttttagagttctggtcacgcccaagttcaatctgtggtaattcctgcaaccaagcattaataccagttgccagaacagagcctgatgggtcgtagattacgaagttagaagagatatcttcttcaagttccatgttgtcttgtttagcttgaattgcagaaagcatctggttagagagagaagtctgcattagctcaatctcaatagtacctgtcttgtctgcatttcttgtcagagcaacctgaccacctgcacctacaactggtgtgataagtggtgatgttctctgtagacgtaaaaatgagtctggggcaaagccttcaatggcaataccattccagctacatacaacgtctttaggggaatattgctgatacatagccattccaatttacctctattattcgtaagccactgtacctttcaagtcaacatccaagatagcccctgctaagatacctgcgaaggtaacatctttcaggatacgagctttcttgtctgccaaagcaacttgagaggctttaggaacattaactgtgtaagatgacaggaagtttctgttgactgctctttgtagagaggtttcaatgacttgacgaatacgggtaataccagtatcatcataagtaatcttaccacccttctggttaattagcaagtctctcagagaagttttcaggtctgattctaaccagtcaacaccacggacgatatcaatccattccccaccagaagtaatccctctacgaaccactggaacaccaccatcaaggtcgataaagttacagtgacgtacatctaaagctgacttctgaatgcttgtcagaggtctcttattagctggctgtaaagaagcagctacaccagtcaactgagcattaccccaagcaattgaccctgcatcgtatggagcgccataagcaatatatgccatctctggataatcttctgccgctgtgtgatgccacaagcaaactgtgcgagtatacatactcttagcaagctgtgctggaacatcatttgcactatttaattctgtaccttgcagtgctgctacatcagagttagctgtgaagaagattttcttacgagcctgaatctcagaagccattgccaaaacaaactgttgagttctgtcttctgctgcaatgaaataccagtcggtagaataagcttcaatagctgccagagcagttgacgctgtatcagcagttgtgcttgcaatagacacagtttgtgctgtagtggttaccttcacgaaatcattgtcaccagctttggagatgaccattgtggcagaaccgttgctaccagtaacattgactgaaactttatctttaattgattggtcagcttcaatctgtgttttaaactgttgtaatacattctcggcagtatcttcaccttgtgaggtgtactggaatggttgtgacattcccccaccgacagctacagtaattgagtagtccgtgctctcagtaacctcatcaggaattgatacagtgtactgcatagcgcatctaccaatataaagctgagttactttaggagtctgactccaaagttgtttagcagccttatatgcagcagtattctcatcgaaatcttcagcaacttcagttaaggaagtataaccacgcactctttcttcaaagttatctgttgaagctaagaatagtggcaaaccaaaaccttctcttgtagttcctgcggtgttcaatgtaatatctacattaacaattggattccacatttattttacccctttggagtctacatctagatggatagtatattctggtggctcttgtccttcttcataaaccaactcgccatcaacaatgacacgctcaataatacttccgcgttcatctttcaggactgaattttttacaagagttacaacaagaggcgcagaattttcgaaatctgtattgagataagtgtagtcatttgggatggctccagtgtctagcactgtagctcctgtctcttcaagaattaaatccctgactgaactcatctctaatcgttgtttaagctcaagcataatactgtgagcacctttcccatttaccgtaattaatacaggaatctgaaaagcaattctgtaacaaactacatcatcttcaacaaacttatcaagaacccaaccataaggtgttgcagcatcttgacaatatacggtaataaatggctggtcaggttttaaacctttgtcatttgagttatcagaagggtaagctctaattacgtttggtctattatttttatcacgagctaatctgtgaccaataacatccactaaggttctaactagacctttttcaagttctgctgtttctaactgcattcattttatcccttctaataatgatatattcataatgggatgtatgggctaattgctgtgaccaatccatagtcataaatacttcatactcatgaccatcaatcataacaatatcagactcattccactctacatcatctgaagttctaagtttatatgtagtatacaggattcttgtatcggttagtctaataccttccggtaaagcaatctgtgtaccattctttacagaacctttgatatatggctggatattacctttacagttaacctctacaatatcttgtgaagctacccaatcaccatcatcattataataaccgtcttcagagactttacgctttactacaaagctgtgtctgtttaagagtctcatttcttaatacccttcttagtagaaattttataagcaaggttatcccttaagtcacctgtctcaacaagaggtgcattaaagccttttttcttgactgtggaaggtgcgttaggagggaggatagcagaattaccaaaacctcttttaattgccttttgagcattctttgcaaatgcttctaaggtatctgaggggtctacgttgagactgctaagttgcttatatagattcttcttagtctgctctaacaaggtctgtctgtttagcatcatagtgatttcaaacaacctacgatatactttaccagaagctgaaggaaccccaataacttcttgtaaatacattaaagcaggataagaaaaaccagagctatgttgaccttgttcttgaaaatacccaacttgagcattagccgtttgcaagttcttcatagccccgactaattttgctctagcggggtgaataacccttttaaccattattcatctcgctcgataataaatacgccattaacacggttgcagtaatctctgccttcgtatctggcagcatcaccatattctgtgtatttcttgacagagcaaggattctgacgacgcatatcaatgtcacactgattaataccacctgcatagggtagtcctgaaacagagcttttaacaaggtcgtcataaacagctttcagagatttgaatctggaagagttacgtaaataaacaccaccaaccttctcatctcccatcttggctacttgaaagagtaaatatttaagagctttgatggctgctttcttttcatcctttccagattctagatagaaccactctagcacagactgttcaataagaatttcatcattattggtgtctgtgcagaggattcttactctatcaagagggttattggctgggtcgcctgtataacacattcataaccctccttaagaatattagtctttagcgtcagcacgaacatctaccagcaactgaggacgagtacagtatggcagcatgtaagagtgagcttcgaagtcaataccttcgtcacggtctttttcatattcgaatacgtacagttcctgaccaagtgtatttgcgtaacccatcttaggacatggaccataagccacttcgaagatgttgtttgcttcaccaagcatagaaacgttagggaaagcgtgtcctacaccaacctctgcaccagcaccatcaatgctcaccagagtatgaaccttaccacgcttgtctttgaacttaccgttgtactggacaaacttaacaccaccgtagtagaaggtgttcatgtgagcctgaacgccgtcagtaccaccagttctcagagaaccagtaatctgttgccaagccagcggagtctgctgtgcaagataagcgtcacgaatcttaggatgcttaaccagtttgctgaagaatacacggtcaacaactacgtgaatttcttcaccgttgattacagtgccagtcttagcttcgtcttccatgtgcatacgcagttcttcaatagaagcgtcgatgtcagcattagggttgccaaggtcgaagtaaacagttttcttctcaacgtcgaactgcttgtacaggtcagcatacagagtaccacgagcatcaacaactttacccttcagagcttgcataaacaggaactcacgagtaatatcgaacttggtacgaatcttcatcagcttcttagcacgtactacagcttcagtagtcagttcgtttgcagtgcctggctgacgtacaccctgaatctcatcaggagtaatgctttcaacttctttgaaatacatcattgggaagctgatttgacgaacacgctcaggtgcgctagtctctgctttacggctatcacggtctaccgcatcaagcaagctaacatcccaatcagtcaagtccataaggaaagtagtttgggtgattggtgctgaacggaacagacctaagttggaaatatacccataagtatttgggatagactggacttcaccagtcaggtcagcaaggaaaaatctgcttttttcagaattagtcaacattgtaaaattctccagaatgtcttattattgttattacaggccagttggtacgaaatcaatacctttagcagccagagctttcttgacgttctcagcattaacaccagactcaagagtaagcatgtctttcagttctgcgtcacggtaaataccaacaactttcaactgaccgtggtaagacagttgcaggtctgaataaaagttaacgatacatacagaatcagcctgagcttcttcccctgctgcgactttagtaccgtcttccttcagaacttcacctacacgatattctgtagatgcctgtggagtgtactctttacgagagtggcctgttggggtaacctgttcccaaagaatgatatcattcagaggttctcttttacctaacttagtaaaatcttgatatgccattattgtgttccttatttgataagagattttagagcattctggagagccagtttgcgttgttcagcggtgtcttcggaagcattcttagctggttctttttcttcttcaaccaaatcagcttcgccgtcattacccatttcttccatagcgttggaatgttcaagaacagcaccagcagtttctttcagcttggtaatttctgattctttttcttccattgcagaagcatgggacgcgatagtttcattaagtttctggttagcaccttccatagcattcataaacagaacactcagagggttatcaagaccagcacctaaaatagtcgttgcagcttcttttgcatcaaatccaaaagcttcagcagaagcagaaatcttattagtcaaatctgacaaagcagcttcctgttctttagctttcatttgagcaacctgaagacgcaaagcttctagttcttgcttttcttgttcagtcatttcttcacctgaattgttaacgtttaaacttacaggagcctcttcagaaccttgtaagtaatttaagaaatcatcttgagacatgattgagttaattaaaccaagttcaagagcttcctgagcagaataaacattcgcctcagtattctttacagcttcttcagagagattacgagattcggctacaaaacctgtaaaggttgcgtaggtatcattaattctcttttgaagtctttctttgctttcttctgagagtgcttggaatggtgaacccatacctttaaactcaccagctttgatgacgttaattgttacgccattcttttcaaatgccttagttaattcctgatgaaccataattacaccaatagaaccaacatctgcatctggtgatgcaataatttcttcagcagaagatgcaagagcgtatgcagcggaacaagcgaactcatctacataagcaataattttcttttggcctcttgaagccataatgtgacgtgctaattcaaagcaacctgaagcttcaccaccaccagaatcaatgtgcagaacaatagtcttgattgactcatctgctaaagcttcgtcaaagcctctacgcaaaccttcataagagcttaatccacctgtacacattgcatcaatgaatgtcatacgatgggttaaaccacccataatagggataatagcaatgtcatcttttacttttaaaagacttcttgcttcacctttgggtttatcaaagtttactgctgcttggacatcacccagcaatctgttattcacataagttgctgctgagtgagctaatgattcagtggctagtaaaggttggttgaataatctatcagcaagtctgaagatattcgaactcatttttactcaccctatttgtttaaatctacagagactgaagagataacatagataccttcttcagcaaagaattgaggtttgctaagagcaccagttgccacgcatttatcgttagcatcccacaagctatagtgtgagaccgttgcagaagctgggacagtaatattaactgtgtcttctgaggcaattaagccattatccggttcagaaaaataaatagccactggctgagtaaccttatttgctgtagggtctgccgttgggtctacattgtgtaaaataatagtcgttggggttagcgtggcgaggattttattcttaccatcaatagttaatgttcccattaattaaaccttactttttgtttaaggactgttgaatggttaccagattcatctaccacatttacaatcatatcatatactttacctttgacaagtactttgtaatcattttgtgaaaaaatgtattcaagtctgtttgtttctttattaactgtcattggagattgaaatgcagtatcgagggtaatgaaagcggcttcaatgctattaacattgatacgtttattctcgcagttatataactttacacccaaaaggcatgaactgtcaaatggaattttaacaatttcactacaatttcctgaaataaacggttttccactcattggtgcatcaagtaacctgcaaatagtgaaaacgtcagagattccaccatcactaacataacctgaaaggctgacccttgagccagcctctacagataacttatcagtaatgataaggacacccctatacgaatgcactcgtgtagcatttgaaatagagataacttcagccattatttatttgccttatttgctgtgcttgggtctttcgctgaaggtgtctttgcagtaccttctccagcggtcttataaccatctcctgagcggctttggctatttggagaaagcttttcagatactggttgagactcatcagcaggaggaagaccaatatgctctctaagtttgttagatagctctttgtcaacttccaaagcacctactgcaacagtcttctgaatataagaaccaattgcttcaaggtctggagtttcgatatcatcatatgtgatttgtacatgttcttcatcatcccacatattaagagcataagtctgtgcaactaaatcacggttaattacgttcttaatttgcttcagcaaaatatctactgacattgctaataagcttgtcttagaatctgcaagagagaatgaaccatattttgactgacccatagcaagaacatctgacataaatgccatcataatttgcttggaatatctgtcaatgatagaacctgtatcatatgctttagcaccctgtctagagactaatgagaactcaaaaatatcctctttagtatctgggtcgatatatctaggccagattaaacctgctctgtcattagcaatcatatcattaacaacagttttgcagtattgtacgaaagctttcttttcaggttctgcattttcatccagataatctggtggtaaaccaatctttggcatacctaccaagtctcttgaaacaccaacagcttcgtactcttcaatctgaactttatacttccacggtacataggcattaagtaatggtgaacgaccttctgggtttccatattcatcatcatacttaaacagcatgaatttagctcgtggaagttttcttgttagtggtctttctccaagattaattgctccagcaatatgtgaaacatttctcagattctgtctaacaccagtaacttttctaaagtcttcgtcaaaataccacttatcaagtgttgattggtttctgattggtaatttagcccatccaattagaccatcatcaaattttgactggtactttccttttttaccctgtcgcttcttataaactttctcgttaacacaaaacccataagtgcagaatgacattacagaattaataaaatctgcccaatcatgctccatgtcatccattaaagaattaaagaagtctgctctttcaagcattttagggtcttgctcttttccctttggaggtacgaatctccagttgacttttctgacaaacatcttaataatatttacagatgctgctacagcagggtcacgcatcattaattggaaagttttaatactttcagggaaccttagtgcctgacgaggttcttcatagattcttccattcttaaccttcagacccaaagaacctacttcacccattctaaatggtggtaagctttcttgtgtttctgtaatatctgccattcttctcacctagctatcaacgtctaagcccctcatatgggtttcctctcactaagtctgtgtgagcacccattgatggtggcttgaataatttaacttcgttaagactgttgaaagcatcactggtagcatccacttggtcatctttagttttgccatcaccacaaaagccttcaagctcttgaaagtaagcttcgttccaactacctctcaagacttttacaagtccagcttcagaagcagcagaaaatcccgcaaagcgggtaactttatctttatttgttggtttagctcttgcacgatagcctttctcggcaagtttcctgatgagggatgttgcgtaggatttaccagcagcgcctgggtcttgagggataaaaataccagttcgcttaccgtcactttcagcagtcaaattaatttgtgtttcgactccagagggtctatctctaaatcttactacatcaatgatataatagcaaccgtcttttttagatttacccatcttaacacctgctgtccagtctggattagggttaatctcagatggtaaagttgctgctaagtcccatgctctaacatcaaatacatcttctgggagtgaatcaacaatctcacaccattgtctttgccagtagtttgaaccttctgcacgagccttccagttaccgaaacgaagtcttgcaacgtttacaggggtgttgttttccaacttaccacggtacttaggttctaagaagtcaagaattgggttatcatcaatcgtaccagagatgaaggtgtatgtttgaggaatctcaagagggaacatttcaagaatcttgtctctctcccaatcagaaaccatcacaccatcattcattacataccaacgaatacgaccacacttttcagggtctggataaccttcttcatctaagaatggttctacccaatcataaataaagtggtctctgtctgggttcatggaaatcttcatgtatgaatcaccttcagcaccagaacgcagacgagtctgtaggtatgaaatctgtgaagcagagaagtgtgtaccttcgtcaaagtagattgctgagtattcaataccctgatgaccttcagcgtgcttttcaagttctaggtaggtaaacttgatagttgccccagaagggaatgtgatagtcattttctgctcatgaggaatcccaccaaacttaccaaatagtttctttgcagcaggccataaaccaccttgtaactgtgttgtatttcgacggaaatatacagcattatagttagggtcttcaataaatcttaaagagtccattaacaatgcggcagtcttaccagcaccagcagcaccaccatagagaaccaagtcagcattagtatttaaaaagacctcttgagaacccggttgaggggctacatagttcttatcagtcatcaatttaaagatgaggcgaacttggtctggtgtgtatcttaataaagtcagaatttgagttggaaggaatttagaggggtctttaccgaatgatttaataatttcttttacttcatcagaaagccccaactctccagctaggactttcctaacatcttccactcgcttctgcttaacagcatttaagtccattaagcgcctccgcaaatagaattattcagagtctgtagcagtctcttctttcttaacttcgaacttttcatcaacagcatcaaggagtgcatccatagatgcttctttaatatcaatgcctgttgctacagataatctatctgcaattgccatgatagtgttctgcataaattctagctttttattagcttcataaagttctttgtaaacggtctcactcattatgttttctccaaataattaaccatgtttccccttaaaaaagacggcacagagaccgtcaaggagaaaccacaatgtacgtcagagacatactgtataagccttcttataaagtataactctgtaaaaaagccctgtctaaaaatactcttcggtagcgaaaggaagaatacttatagcagggcattattattattattttaattgagagagagtaaaataacttggagaatccgaagggactcgaacccttataaacctgttttgcagacaggcacatagccatttctgtcacggattcaaattggaggaagataccagacttgaactggtacaccgatttctcagctactggcagtttagcaaactgctcccttaccttttagggttaatcttccatttatttctgtaatgcgttcttcatttctggtgttgcaatagtgtcaattacaccagttttacaggcatcgtcaaaccagtctggtaagatacctgctaagaacccattgatattcgttttaaggtactctgcaataagggcagcttcttcttcaatcatctgcacaacttcatctgcataagctgtaatctttgaaataccttcattaatcttactaacagcctgattagctaaatcagaaatagtatcaagaccctcatcaatagcgtcttgtaagtcacttaatacatcgttaacactctctagtgtactgttaattgtatcaatagctttttgaccatattctgtagcaacacccataataccactgaacggtgtacaaccaacttgttctcctgctgcacccataacattggaatacccctttgctacctgcatacgtgatgaaaactcatcaatagatttttgaccgtagtctgtcagggtcttagtagttgctgtagtgcttgtaaggcttgttgtaaagctgtttagaaggactgttgtaagtccagcagcaacaagtttctcctgcattgtagggtctgttacagaactaatagagcttacaagtgatgtagaagcagctacggttccaccgagaactgctgcaccagtaataagtgggttagaaaaccctttaccggtttttaagagattaaaaatctccttaccttgttctgtcatctctttcattaagcacctttgaaattggtagtccagtgggatttgaaccctcttctcatgtttttcagacacgcgctttaaccatataagctacttggactataaattggggtgacctacgggatttgaacccgtatagaccatgttcacagcatgggtcattaccatttatgataaggccacatttaaggactctcgtaagaacccttagaagtggcagcggcataaggatttgaaccttaataggacagcttcagagactgttgcattgccagttatgctataccgctaaatttggtactccatatcggattcgaaccgatacataacacagattttaagtctggcctctctgccaattggagtaatggagcattggcgggggatgttggaattgaaccaacttcttcgatttcaaagaccgaggttttaaccttgtaaactaatcccctttaaatctttactttcttagtggatgaataaagaatgccaacataactcttccccttgagaatgctctttcttctgggacaacactttttagtttccatccaatataaattctccagtaaaactgtttaccaaagactttaattgatgggataaaagcgaataatccccaagcattactgttccacattaggagataacctgtctgattatcttcagggtcagaacttacgttgatattacctttccacttagtaacatcttttacatctcttcctaatacatggtaagagaagttataagctttgtttctccagagccatccgactctctgcatgtagacacccagcttaccaatctttctaatcttagcccatcgttcgatatgaccttcgtcaccatcaattgggttgtcatatgtctccatccatctaaatccgaaaggtaagtggcctttcttctcactgtagaatggaactacaaaaggtgctaagataactgctaagatttctgcaaatggctctaacaaagctaagaaaatccatgaagcatactttaagtatctcatctaaatagcctctttaaattggcgcaggataagggattcgaacccctattaacagcttcgtagactgttgctctatccatttgaactaatcctgcaaaattggtgttccaagacggattcgaaccgtcactagtacaaggtttgagcttgcatcctctaccaattgggatactggaacatggtactcactaaaggacttgaacctttttcttcatcttgtaagggtgatgttttaccatataaactaagcgagtgtgaaagaggtctgaagttgtgccgctaactcaactccgtggaatttgttacggtcttcagttgactcaaagcggtctttcacttgacctctgaattggtgctgctcacaggacttgaacccgcatctccatccttacaagggatgtgtaatagccaattatacgaaagcagcattaatttggagcatccagagggaatcgaaccctcaacctcagtttggaagactgtaattttcccgtttaaactatggatgcactaattggtggagtcactgagaattgaactcagttcccaagtttgcaaaactcgaattttaaccatataaactatgaccccaatgtctggtacaggtggagggaattgaacccatcgtcttactgattaagagtcagccgcataaccattttgctacacctgcattaatttggtaggagacaagggattcgaaccctcaaacaccaacttctaaggatggtaggtttaccaattaccgtcaatctcccattaaatctttttagagaacttctaagaacctaagcaacaaggttccacaacaagccgtaataaccttagaagccctctaaaaagacctaaaaggtctttgcatagtcttgtttaatccggtgactagaacctttggagagcttgatattatctcttctccgtgacacctactaggtgttttatcagtgtgtacgacaatacacgagggataccaaagcaacatccgaatgaagcttggctttaaaaatcttattaggcggtaagtaaaggagtcgaaccctcaccgtatctctacagtggcaacagttttcaagactgtttggctgccattagccgctacctacccctaataagactttggcatgggacggaggagttgaacccctttgaaacggttttggaggccgttgctcatgccttagagtcttaacatcgtcccatactataattcgaagcttaccgtattatctcaacactgtaaagccccttctcagattatttacatgttctggaaaacatgagatacagaccacctccctacaggaagacccgcttaggtcgtctaagtaatctgctaactaaattggtcgaggcggcaggactcgaacccgcatactccacttactcggttaacggcggtttagaagaccgctgagatacgccccgtaattatctttaaagactctcttagaaagcccttaaagatgcccaccttattaatcataccgtgggcgagtacgccaaattctttgatgagggattggaagacctcactggtgtttagcctatcaagctactgccagaaaaacattgtcgtttgcatttattttaaatttgcaaaatagacgctacgcaacgaaaactaaggttactataaagtagtcacatctcaatgtcaacaactttattgaaattggttgtaggtgagggtatcgaaccctcttctaacggttatcagccgtttgcattaccatttatgctaacccacaattggaggttcagatgggaatcgaacccatattcatagggcttatgaaacccctgcattaccttatctgcgactgaaccatattggtagaagtggagggattcgaacccatcgcctgtcagattaaaagtctgccgcatcaccattctgctacacttccattaaattatctttgtagataagctacccagacttgcttaaggtctgtagcgatgtgcctttttgggtttaaatctagaatttaccctttcaccctttgtggtcgcatactcacaggtaagcttaataacttatctacaaagataattaccagaccgttgtttatcatcttaagtgctaccattacaccaactcgacctctgccgagtgaaggaatcgaaccttcaccttttctttaccggagaaatagattgtttaagttttgctgtaaacggtcttctgtaaatttgttgagccagaccaagttttaaatttttcaaaattaaattggcttgaaaatatcatacgtacttgctgtatttggtcttccgctcctttaaaggatactcgtaagaaccctttaagggaggggctaaatagccctctcaaaattggcggttacgaagggatttgaaccctcatcatctcccgtgacaggggagtattttaaccagattaaactacataacctttattggtgtgccgtgtaggagtcgaacctaccgagtctcaatgacaagggatttacagtccccaccgctaccatctacgggataacgacacatttaatttctattcaggctaaggacttgcaccttacaaatcggtgagcaatcgcttctctcctaaatttggcggttagtcagggattcgaaccctgtgccattcgcttaacaggcgaccgcacataccttatgtgcttcctaaccatgtttagtattaccagaccgtatctttcaatttttccgctaaaaatttaataaatattgctgtaaacggtcttctgtaaatttggaggcgggtgcaggagtcgaacctgccgataccatgctaatgagacatgtgagacgccctttctctatacccgcaattcttaatgaccagaccaaatctcttctttgtccgatttaccttcagatgaataagattaagtttgctgtaattggtcttctgtcaaaactggcgttccagaagggatttgaaccctcagatatccactttgaaagagtggtgactttaccattttgtctactggaacattaatttggtctctgttggaggacttgaacctccggccttaccgccccaaacggaacgctctaccaagctgagctaaacagagataaacttttcaaactctatgtaaccactttaacattattttttagtggttgtcaagaacttttttaaaatatttttcagtatcttagaaaagctctcatttcgtttctatgtagaacatattaaagggtattaaacacattgtcaataccctttttaaaacttttttaccagatataacggtcaatcattactgctttgagcattacgctgattgggtcaaacttctcaccaccaagcagagcttttaaagtggctggagagaaaccagataccattgctacaccgttatccttaacggacacttcgcaagtaccattacggtttgctaagtaccagaataccagttgtggcatctcatatccagcttttttgtacttgctctgaattgcttcaaagtttgtacgaccgttagctccatcaacctgattgaactccatatcagagaatatgataagcttacttggcatatctttctgagtcaagttgtttcttttacctgtctcaagaatacggtcaaaagctgcttgtaagttggttgagccatattcaacgtgtcgcatcacctgacgatgacggtttcgtaaatcaccactcagttcaatgaaatgagggtttgttgaataaaccatcaactcatccttaaagcaacctgtattgcgttctgctacatacaaggcaagtgatacaccaatatcaagtgcagtgattgaaccaaaattcacccaagacattgagcttgaaacatcagtcatacataggatgttttcaccttctgccatccagtttggtagtgctttccactgctcattagcaacatctgcattaccatacttaacagatttaatcacatcgtatgggtaaacagcaccagcattaatcttagcctcgccctttgataaggactcaatgtaagctttgtagcgctctccatctttacggttaaacagtttttggtaacgtgcagcagcaagtgaaggaatcttgctgtagtcaatcttaccaaactcattagcagagattttttgctcaactgtatcagatagtgcagacaacagtgtgcggtactctttctcactcaagttggcaaacttgcagaaacgttttacaaactgcttatgacgtggtttgactcgtggtaaccacttagccgccaaacctgctgttgcagggtctagtaatgctgcttctaaatgtttgaaggcatctgtctcgaaacgagtacctacgaagattttgaagtcatcaaaacgaccaagttctgcaatcttatccataatgcgaagaacctgcgtagactctaaaactttgtcttcaattgcttgaagcaaaacagttctgaaggctttacgctcacccataccttctcgtacatctcgcatatgaagcaaaatacgaactgcaacatcaacatcctcacgcaaagctttgtagaacaggtctggtaagatttctacattgctacggcttgaaccagcagctttgtaaaagtctacaagagcagacattgatgaagtatggtttacagcaccattttcagttcgacctgcatgaaggtgcgcatgtttaaataattcgctcatattttactctcttctctcatttgttgtttgatgtgacagactttagagcaactttatagagtctgtcaacatcttttaaaattattttttaagggttgcaacagcagagaacgttggtttgttgtctgtctgagactgaccaccattatcaggagtcttcttagtgtctgctgcaattgctttcatttcacctgctgagtgggtcatgatagttttaccgacctcaatcatgcttttgatggttacgtcgtctgtgtttaacccaaactctgcaagcttagcagcgtcccttgtaacaatcgcttcaaacaactttgcagcaaactcagcagaattatcaatggtcagttgagcttttacgagtgaacttttgttacgagagccttttggtcttccagatgggtttccagactggccttttttaaactggcctttgtttgttctgtttttcattggtatgcctcttataagacctcttaaaaggcttttaagataaaagatagatatccagaaagatatctgtttaaatagcctttttagaggaaccttttaagttatcttctaagtatttataagcctacaccttgtcaagtactttgtcaacaacttttttaacttgcaatagttcttgacttgttgtatggattactgtaccatcttacttaaagctgtaggtctgccttgttctacaaaggagacttaatgagaaaatcaaataaaccgaagaaaggtaagaataccaatcactgtaaggaatcaaaaagggtagagttaatctactattcatcctctgaaattggtctgtacctgttctttcaaaattacagaagacaagaggattatctatgtgtagttcccaattagaaatcgcagatattatagatttatatcaaactgcaaagagtcatggctatataacctcaattggaaagaatagtcactatgatgctttgactggaatgtatttcagggcaatggctcaatctagtgaacaacacttagtggtttcttccagtgagtttacttcgtttctctattgcagcaaaattataaatcgcaggagaactgaaaaatgttaacagtaagttttaattacaatagtgacggctctgtatcaattaactcaccatatgcaaatgacctacttaaagagctagtcaatcagtgtgagaggggtcttcactatgttcaaaattcttttaaacagaagactattgctaataacttgatgcgtgtaacagtgacgtcatcgaatccaaattatgactttgatagtgaaagtccgtactcattagttgcgcttggagagagcagccaattcaaacttgtttgccacgactcagaaacattccttaaggtattttccaaccttatccataataataagtacagctacgttgatggtagtgtaaatttctatccagcaaactatacatgtttgttgattgataatatgagaaaaagtaagcaagagcctacagaaatttcatttgatgtgaactctagtccagacgcagaaacaagtaagaactttgatatgagttacgcattgtcactcagtaagaaatccgagttcattgattatgtcaatggatttggttttaagtttgatgagagtatgaatcttaaaaaacttaagaacctacttaagaccaaagcttaagtgtgaataggggctgatgcccctttaactatttataaggatatttaatgaaagctaagagtgcaaaagacttttattgcttcctacaatcctatatcaattccgtgcaaaatggtgaaaggtacaaccttaatgatgttatcccaacacctttgacatggagactcagtaaatggcccgaagaagatattacaccaacaagcgaacaacgcacctacaaaccagaaatcaatattccagactctgagaatctattatatccaatgttccatattgttggtcttggaagattccttatggatattcagtatgtaattggtaaaggttataaggttaaaggtattgttgttggtgatgtatctccgaatcacaaaggttattttagactaaacgcacatttagaggctgaaaagaaatgattaaagcaaagacttacccagacttcaaagagtttgtgaagggcttcgttgcaaacgtaaaggctggtaagaggtatgattttagaacatatcaagaggctattttaccacttacctatagctcgtattggcctgaagctgatattgcagaagttgagaagtttgactataaaccagactataaagttccttttagtgatgaactcctttacagtgttggtgcacagatgagaactgctgatttcttcatggatttgcagtatgcaatcatcaatggtaaagatgttgacactatttactgtgaatggttggcaagagttaatccgttctcaatgttgaatgctaagctgaaggatgctatcaagccaccagcaattactcagcaaccaacaggtcaaacagtcaatgagggtgacacacttactctaagcattctagcaactaacgccactggatatcagtggaagaaggatggtgaggatatccctagtgccaattctgcaacttacacaaaacagtcagtagcaccttctgatgctggtttatacacttgtgttgtatctggagaggctgggacaagtgttacctcagatgcggcaacagttactgttaacgcactacctgtgattacacagcaaccttctagtcagaccatcaatgagggtggaaacatcagcttggaagtgactgcaacgggtgcaacgggttaccagtggaagaaagatggctctgacattccttcagcgacaaatgctacctatagcaagtctggtgctctgccaacagatgctggttcatacacttgcgttgtaacaggtgcaggtggctctgtcacatctaacgcagccacagttactgtaaatgcacttccagtaatcactcaacagccaaccaatcaagaaatcactgaaggtgagaccttgacgttgaatgttgtggcaacaggtgcgacaggttaccaatggaagaaaggtgaggaagacatcctcgatgcaactactgcaacttacaccaaagaaggtgcaaccactgctgatgcaggaagttacacctgtgtagttactggtgcaggtggctctgtaacatccaatgcagcaacagttacagttaacccagcaggggaggcataatgcaactctcaagaaaaggtttagaagctattaagttctttgaaggtcttaagctagaggcttacgaagattctgctggaatccctacaattggatatgggactatccgtattgctggtaagcctgttaagatgggaatgaaaatcaccgctgaacaagctgaacagtatcttctcgcggatgttgaaaagttcgttgcagcagtgaacaaagctatcaaggttccaacttctcagaatgagttcgatgcacttgtaagtgaaacatacaacatcggtatcacagctatgcaggactcaacatttatcaagcgccacaacgatggtaataaggtaggttgtgcagaagctatgcagtggtggaacaaagttacagtcaaaggtaagaaggtcacttcaaacggcctgaaaaacagacgtaggatggaagctgacatttatcttgacagtgtatatccaaagtaatatcttcataggctccttcgggagccttttttattttctaaggagaaagctatgaaactttgggctagtgactttggaacttttaagtacactcgtaatggctcgcttgtacgcattgtcgggaacaatgtggtttcaagaggtgacaaggtatatacacggtttactgtagagcttgttgagttgtcacctattgagtctgtgaacaatggcctgttcaagtttgagacttacaatgtcaacgaacatggacaattcaaccctcttggtgaaagtggacttgatattatttcagagcacccattgacaaaagagcaacttgcaggttactataaatctgttctggaaaggcagttagcaacacatgaacaagaagctaaatatcatttacaacattgcgaagctttaagagcaaaaatagaacaagcagagagaggtttttatgaataaagagattcaagtaaaagttgacacttttggccatgatggtcgagaagatgctggacttgccgacgcagtgatttttgagtgtaatggaaatattagtcttcgctttacaggctcaggtagcacacttcgcagaatgcgagatgatgcagatggttgccctgtatttggctggtatgatatggagttccctctttacgccatccattatccagatggtggagaagactggacaactcaatcaatccgcgatgagcttaatggcattccagttgagcaagaagagcaagaacctgttgaactcacattcacttttatcaaagaagagaaagtaggtgacttgtcagtaactgaagcaattcaagtctcacaggttattcgttaatgagtaaagtacaggttgttttccctatttgtgacttctcactagagcgtgaacttgacctgtacgaagaaattactgacgaaattatctggtctgttgtagaagaggctatcaagaagctgtatggtggcctcttaaatacatcaagtaagaagttaagcactaagcaagtagctgacccatatatttcatacgatgcctacaacaaaccttttgaaaatacctgctttgaccttatggtaggtaataacaaagtcaactatttcttcgtcagagagtttaacgatgagtaagctccatgtcatagtgtacaaaaacttctcagatattaaagagtctttaacaaataagcttgacttacaacgtaaaagactctttttaatgtacgatatagacaactacaaccatcctaaagagtttaactacaaagatggtacaaaggttgttgagtttgaagattctgtgacggtatatgtcaagcatgacttaccagcaaagtacatagggatgctagagtactacatattcaaacatactggtatgcgtggtgagtctgttaagatatcttctatagaagtttttgagaaacctaacacacaacttaaaaagtatttaatgaggaaactgtaatgtcagaagaacatgagcatatccaaccagaagttacattagtaaaacatttcggaaatgtagaaggctgtgtagcactttttcagactaacatcaattctccagtcaaactgtgcaaattgacgataaacaccaacaatatcagtgtatgtgtgaatgaagaagtccaatacttcaaattcaatgataaagaggttgatgctgcactgctgaaatacagagcaaatcttgaaaaagatattgaccataaagaagttgtgagtctctttgcagacctccataagcttcttgataaggttgaaaaaagaacatattacatgaataatggctctatcatcaccactatgatttcaccatgtatctctgagccaatcttcacagatgatggtgcttattagcagtgtagcatcagcagtgtctgattggtggttaaaaaataacgccctgaaaacagtgattgatgctatcagagaacacatccctacatttagtccgtggaagggtaaaggtgatgaatttatcgcactgttgagtgaagagagtaacaagcgcagtgcattactgcctaaaaaatactcttgaccgagtatacaatattgattatgatgggagctatcgagaggtagttccctttttagtttctggagaatagatatggctaaagtgaaagaacacgataaaattattttgtatgttaaacagaatccttcaaagagtgttgaggctgttgtaacacacatctcacacaatgggatagtttattttcgaccactgaagaacttagactttgacataacaccaaaccacacatttagtacctccgcaagactgtgtgcaggaactgtatactcaactgctgagattgaatctttagctttcacaggtgcttacaagaactttatagggattgctttaaaggactctgaggaatcttttaaatttttcatggatgctgctaatggtggtagtagatataccatgccagtctttaagaaagttgatacagagattgtcaacaagtgcgaagaaattagcagtaacctgaaggaacttaaaacatctgtgcagaatgcaatttacattattgaaaagaatcacttagaagttcttttcagagatatgctgaaagcagggtttactccagacgaaattacaagagaaactcaacgtcagttcagaaatgctatggtgaaagaatgaaaaaactaactacagttgaagattactacaagctgtctctattagaacaatatcgtagaagtcagagtataagaagatgctatggcagacacgctgaaggtgatttttaccattgctatgacgcagatttaaaaggtgtaacacctagaggtaaagtcctacaaagacttgttgaccttgagtggaacaaacgattgagagggattggaaaatgatttacgaagaaagatacaagatagattaccagaagactggtcatcatgtctccctaagagtaacaaaaccaaatggagataccggtatcatagcacattttggtggtgattattggtatggtacaggttgctttgaaggctacactcaagaatacttgaaagcattctacagagactttacaaacgactacaacagagttgttgacgaaaagaataagtgcattaagcatgaacaccatgccagaggttgtttgagtacagtaatggtactggcatttttcttggcaacattactggcagtatcagcaatcagttccatagctcaagatttgaccattacacagattactgcaaaggtatatgatgtttggtacttgtatgctgtccctttagttggtatcatcatctcactaatgagattcagagttcataagaaacgacttaaggactctgaagttaaacttgaagaggtaagtaaagaatgcaacctacaattatagctgtatgtgttcgttttgcaatcgctgaaatgattaacaaggcaatcttgaaagatgcttatggagagactaagtaatggttaagacacctgtaccaatttttggatttccttctatagaagagtttaaagtttatcttgacaaaaacttctacaatgagcagcctgttactttactgaagagtgacttatcagagcttcttgatatggttattaaggcaacttctgagaaggagcctgagcagaaagctgagaagaagactagtaagaaatccgacaagaagactgaaaagtctgagtaataacttgaggggttacttgatagcccctttgtagaaacttagaaggtagcgaatatgcaaatcatagctggtcaagaacttgacatcatagatgcaaaaacacaggagtacatcgcaacagtgaaggttataggagtcagggagtggaatactgagtacccaattcaatgccttgtgctggagaagtttaaagctaatggtgtacacttttaccacggtgactacatcagctttaacaaagatggttactggcgtggtagtgaccaccctcaagcaaatgagtttaatatgcgtctagcaataccacaaaaagataaccaacaaaacgtaaaagatatccttgtagaagcctatgaagaaggtataatagatgttgtgcatgatgttgaaaaagctttaaagcttgttatgccacatttagagtctggaaaactgactttagagatgcttaatagggttattcggagagcttatgaaagtaaaagagatagtgcaaagagcaatgcttgacaactcgactaaagatgagatgtacacagaaatttgtgataagttaaactgttcaagacatgctgctaaggttcttgtacactgttttatctgggaatgctcagaagcttatatgaaacacgtagcttttgagagttctcatttactcggtgatgcaaaaataggtgtagcactaaaagagcctgagatgaaaacagtacctaaagttggtaatgtgtataaactaaaaaattttattacaggcgagattgttgcagaaggtgaagtgcaacaggtttatcatgatggtaaatatctgtttaagatattcgagtatgatagtcgttacagacacttatgtggtattacatttttagtttcagaggatgacctcatcaagaacaatagtaataaattcgcagtaccagaatatcaagttttacgataatggtgtgatagatatggaaaaagataacttaaaagaagttgaaggtaactacctagtacttgactggagtgatgttcgagaagcactctccgaagaaaatcttgactggttcgaacaaattatctttgaagtacggcataacagagaagttgaaaatggtaaagagccacttgaaggaatctttgtagaaaggtcttatccgttctatgaagacactttgcagaaagttaaaatgtactttaaacagaagaaccgtaaagtggtcactatggtatctcttggtggacagagtatgtctattatggaagatatcaaccctaagagaccgagtaaaggtgtctgtataaaaatcacaggtcatgaagagtatatctcagtggatgattttagtgtattctgtaatggttctgctgtctttaatggatttcactatgacatccgagtgtacccaatcaagggagatgctgttatgatgcagatattcgataacaacaatggattcactcatttttatcagacaactaagtcatcattgaagacagttttagaaagcctgatttaaaatatcttaagagcctccttaatcgggggctttttaatttttataaaattttatcggttgtcccaacctctgggtcaccatcatatgtgaataaaatatctatccttcttaacaaccttcttaatcttactctctatatatagttatatagtactatatagtatcttagtaactatctagtggtcttaatagccctctgtatagcccttctaaatagccatctaaacactcttctaacaagccttcttaacaacctatacaatcaccttaaacatctctctacaccttcttagaagctcctatacacctcttaatctctatgttacctatgacactctctataggtgttcactaggaaatactaagcctctatatagtctgttttaacaaacttaacaggaatatctttacagaccttatctcacaaggtctaacacggtactaacaaggtatcttataagcctgtttctacctgtatttttaaaagactgtgtaggtaattattcagaattttaaaatttttataaaataagactgtcaagtcattttttagggtctttgaaggaactcaaaaatatctgattaggatgtatatctgcttggtagcccttaacagctcccttacaagtactttgcaaaattttaaaatatccttaacaatctcttaacagttctcacatcttcttaacaactcttcaaaggtcttaacagattcttaacagaactaacaaggctgtaacagtttcttaacagttgatacataggttttacagaatcttaacagatgactaacaagagctaacaagttaattttaaagagttattttgttaagataattaacaagtttctaacaagtgtttaatctttttaactagctattaacatggtcactatctctttcttatcgttccctttcctttcttagtgattccttaaacatacctcttaaaagctctctatagctctttataagctcttttaagtctcttcctagtagttacaccccaactgtacagataactctttatagggcttcacaggagcttttaaggctatgtcaaagactcttacaaggcttttacgtggtcttaacagagatttaacaaggggctaacaagttgctaacaagtgtcttaaaagcataactatgtagggattgttaagaaattgttaagggggctagcatttacgtaacttttaagctacttcaaagtaactttatagcccctataacatacttttaagacaataacaagccctttttagtagttcacaagataactaacgagatgataaagcttacacccttataagattcttttaagcctctataaagccctgtaaagagctttttaagataggttaatgcaatcccttaagttaggttgataaggctgttatagagctttatagagcgttttaggggttgcccttccctttcgggttatgggcttgtatttaagttgatttgataaaaggctatagaatagactatagagttattgcttttaaggtatgagatagattctatcgaatcagtggatagattctagaaaggtgagggaaagggattgtataaggattcgatagacgtaaaaaagcccctttaaataggggctgttcaggtatctggggctaaatagccccgctgcgtcgattagttataatcttgtttgttgtagtacagggagacaattttttctccccaatagtgataagtataaccatccttgagaacttcttgttttgtttcctcccagaactcatccgaaggattataatctttgatggtctgactgataagacctttcaccatttcaaaggcgttatcagtgcctgcaatgtcaaatttaacatccagagaggaaaaaccgaactcgttaacagtagcgcggatagttgccatttttagattctccagtttaggaagtagtttaaggactttatttagtggggaaggtcattccctccccgttgattagtaatttactgcatattggcgtatgttgcaagccttttttcgttgtattttgtaagaatctcacaagacaaaacatcatactttgtaacagcgttgcctttgtcgaggtcaaagaatccaaacgctttaccatctttgaatccgacaacttcataagattctttgatgatttcaccattgaacaaatcgctttcgatacggtgaaataatgctacatcttctttgtcggttgcaatctgcaatagtgtggttaattctacgttttccatcttgataactccagtttaggactttatttagtggggaaggtcattccctccccgttgattgataatttacagacttttgattgtctcgtcaatatctttttcaatatcttttaaagttttttctaagttcttgatattgaaggttaaaccttcaccgagagttttagcgtaaccgttaggacgtaagtcataaaggccaatttgttctacattggagaggttgaccatttcaccgcttacatcataagctattgatacagtattttcaggggctttatagaacttgtttaaggacttgatagaacgttcataagccattttataaccgtttaaaaggtttttaacgtggttgtgaacgtttttacactcatctaagtaaatctctaagaataacggtaataattccgctacagcttgcataaagtgagagactacaacggttgcaacattacgacgatgtacataataagccccgttttctgacttagtgatggttgcaaagtgtaccccattacaacgaaattcgtatgtatcttttacaggcttagacattacagcatttgaacggatgaagttgatagctttaaacttgttcattttgactctcctagtttaaggattttatttagtggtgaggtcatccctcccgttgattagtaatttacttgttttgatagctgattgcaagtaattttttgagcttatctataaagagtcttttaagtgaatcccttttagataaaccccctcgaacaaagttaccaatgtcaaggggtattgtcaacacttttttaaaagttttttgtaagttattgattaactgatgaatattttttcaggttttacatagctgatacgctgactttttagcaggtcatcccagattaacgcggcgatatgggcataaccggattcacgtaaaagcttcattgttttacttctcgtttcaaaacggcttgcatagtactcactattcagtgtcgttttattcccttcgttgtctacatggataatctgcatcacttgaaaggggcttgtgtcctcgcctttattccactgttcaaagtattttaggcactgcataggtgacatcttatcacttacttgagttgaccaagatgcgccagctttatcggtaattacggttacataagccatttttgaatctcctagtttaaggactttatttagtgggggaggtcatttcctccccgttgattgacaatttacagacttttatcaggcttgtctagtctttttcaatgataatctcatactgaccatcaacactatcgaaatagattccgtcgtcatcttctgtcttaaagtaacactgaatatcatcacttgcgggatagtcttgccttgctatctggcaaacttgaatagcattttctttacttcctgtgaactcctcaagccctttaaaatcacatgaatggccattacaaatagaaaggataaggtaaacggttgtaagcatgatttaagccccctaaaagcccctacaaggggctgattagtgtttataaggtgattgcataggtttttagaaaaagctctttaaatcctcttctgcaatgtttcctgtcagtgtatccatgatgtcacaaaaaacctgaatactgtccgactgttgaacacttttagcaagaagctccagagactcatcaagatagtttaaatttgggttatccaatgaaggaagacaaaaaggtgaatacatagcgttaaactctgttgtatagacctttttaatccaatttacatcaaagtactctgtaaaacttgctacactcgacatattatcacaagaataatcatcgtttagctcatcctctggaatatcgagttctaagataacaatattttgagtcttcatctgaaaagctgcggtgatagtggcattacctagagcttgctgaatgccctctgatgctatttcttcctcatcgtcgccatagattttattttctggatacacgtaaaaattgccgtccatatccgaacaattccatgcgcctgatggtttatcaccgttattaatcaggttgaggaaattttcttgagtagtaccgtgaaaacatttcatttttgaatctccagtttaggattgagtagtaaagttctttatctggggcttaagatatcaacttttaagccccttgtaaagtactttatttgttatttttgacaacttttaaaactgcaagataacctaagcaataagaatcaccgaagagagtcctacccatgaaagaatcccctttaatatcctttgcagtgacagttttttctacgccgtgaaaaagaactgtatcaccggctttaatgtctttgatgtgtacagtctcgatagatacgccgttaataatagccattttagaatctccagtttaggatttagtggtaaagttctttatctggggcttaagatatcaacttttaagccccttgtaaagtactttattgcgtcttcttcgtaaatattagttttacagcgattgttggaagctcttcgatatttgtaaatagcgttactttttgagtagtaaccttgtaaccgttttttgcagcgtaacccgtaaagcggttaactgtgtagctatatgtttttggtgtattgtctggcatatggtacaggaaaggtttgcctaaattttctggttgcgtcaacagtcggcaagtatcagggatatttaaaaaattcatcattttgaatctcctagtttaaggactttatttagtggggaaggttaatacctccccgttgatgtgtaatttaatctatctaaaaataagtgtcaacaattttttagagttctgcataaattgcatcgcagatattacgaaaatcgtgatttgacaaattacgctgcaaccaagtggcgaaaaagtcagcgattgcaaagttagcatcatactcgacagataaccacactttaacagcaaatcggaacattttcaaatctaactctttattcattaccttagatttgcctaacatgtctgacatttcatattgcgcgccgtctagcgtgatacctgatgcaacgtcagccaatgaactttttacattttcaacgtctaagataacactttgaatcttcccgataatgttgtgcaatgtttcatcaggcgctgatgatgtcagaacattaatcctgttgacggtcaaacgtgcttttaaaattgataattcacggttattaatagccatttttaagttctccaatttaggattgagtagtaaagctctttatctggggcttactttatcgaactataagccccttgtaaagtactttacattaaatgcagttttttgccttttactataatgtaactcgatgcgctattgctttgcacatcttgataaattctgcgcaaacgtccttcgtagtatactttccaactggttggaatctttttcccgtatcctgtagcagttttttggagtcctgcaacttgccaatccaaaatgtgctgttcagcttgtaaatcctcgaagtgcattacaccgttcacatagtgacgtagtgtgacatttaaagtacgaccgttgttagtagtatacattttaaaagctcctagtttaaggattttattttgacagttcactaattaagacatcaaagattatatcattatctgctacagttgcaacaccagtgatataatcaatttctaagataacaacaactttcgtacataaaccgtcatctatatcattccagacaactttatcacctgcacaaaacattttttgaatctccagtttaggactttatttagtggggaaggtcattccctccccgttgatgtgtaatttaatctatctaaaaaccagtgtcaacagttttgttttcgtttgctcaactcttgaacaattacagcgtagtagtcttttaagtcactgacatttaaagcatttatcagagaattataatcatcgactaactgaaaatcatctttgaagatgtcacttatctgataggttttcgctttatatctgaagctcatatctagccgctttatttgctcatcactgagacgccctagaaagctctctacaaggttattgctaacctgctgtgtgattgccttatttgctagattataggctttatatgccttatatagcgcgaaaatggcaatgattgcagtgataccagtcattaacatggtgtttcctctttacgtgatactttgccacttacagttatctcataggattctaataaatcgcttttagactttactggacttttaaaagtgtcatcatagatattgacttgcaatacaggttttttatactccctgcaactgttccataagcaaatcactacacgacgaccttttattttgccgtgtaaccattccataacatcatggctattccttgatgtttcaatgaaatcaattttgttgagtaatttgctcagattttcacgcacttgatttgataatttcattttagaatctcctagtttaagggctttatttgataaatctctctatctggggcttactttatcgaactataagccccttgtaaagtactttatttgttaattttgaagatagttacgtaaccatcactaccgattatttgaggcgctccagctttttctacttgatagcccatattttcaagatgataaacagcatcatcataaccatatgcgccaccctgataacgtctcttatcacattttatcaggtttttaccacgtccagcaagtgcattcagtacagctttttcacttgatagcgtaccatctaacatggttgccgtgtaatggttgattctattcccgtttacatcatacttaaaattgaatgcgtgaacaacgataatgttgcctttaaaattttcatcaagtgacttctccagtgcgttgcgaaagttgtctttgttgatgaatttaggtgcacgatatgccatttttgaatctccagtttaggactttatttagtggggaaggtcattccctccccgttgatgcaaatactagataaccacgttcaaagagtcaagaaaaaattttaaaaatatttttggcaaaactgtaatgaaacgggcgcacacgactaccacaaaacagaacacaaatcaagtacctaatggtcgagtcgaacctattcatattttgattggacgtcagcttcgtaaagaaactatgcacgatgctattaaaaatttcctggatgttaatccagaggattaatcaaccaagcctgatctcagcagatcaggcttttatttttcttgctttttgctaaaaattttggtataattcttagataaattgatgataaggctatcttcgtatgtgttctagccctcttaataaatctatatgcactacaataaaaagatttttcttgctcaacctggtttatctcttcactatttgt

SEQ ID NO: 3 - protein, 57 aa, Unknown
  Found in bacteriophage isolated from environment
TNSEEINQVEQEKSFYCSAYRFIKRARTHTKIALSSIYLRIIPKFLAKSKKNKSLIC

SEQ ID NO: 4 - protein, 56 aa, Unknown
  found in bacteriophage isolated from environment
TRSFRLLNSLLISKMSVDLFLWSTISHNCPLIFPRRTTIQKHFLQLSYLFGTNCTL

SEQ ID NO: 5 - protein, 77 aa, Unknown
  found in bacteriophage isolated from environment
NIPDTCRLLTQPENLGKPFLYHMPDNTPKTYSYTVNRFTGYAAKNGYKVTTQKVTLFTNIEELPTIAVKLIFTKKTQ

SEQ ID NO: 6 - protein, 180 aa, Unknown
  found in bacteriophage isolated from environment
MKCFHGTTQENFLNLINNGDKPSGAWNCSDMDGNFYVYPENKIYGDDEEEIASEGIQQALGNATITAAFQMKTQNIVILELDIPEDELNDDYSCDNMSSVASFTEYFDVNWIKKVYTTEFNAMYSPFCLPSLDNPNLNYLDESLELLAKSVQQSDSIQVFCDIMDTLTGNIAEEDLKSFF

SEQ ID NO: 7 - protein, 113 aa, Unknown
  found in bacteriophage isolated from environment
MAYVTVITDKAGASWSTQVSDKMSPMQCLKYFEQWNKGEDTSPFQVMQIIHVDNEGNKTTLNSEYYASRFETRSKTMKLLRESGYAHIAALIWDDLLKSQRISYVKPEKIFIS

SEQ ID NO: 8 - protein, 87 aa, Unknown
  found in bacteriophage isolated from environment
MENVELTTLLQIATDKEDVALFHRIESDLFNGEIIKESYEVVGFKDGKAFGFFDLDKGNAVTKYDVLSCEILTKYNEKRLATYANMQ

SEQ ID NO: 9 - protein, 100 aa, Unknown
  found in bacteriophage isolated from environment
PSPLNKVLKLLPKLENLKMATIRATVNEFGFSSLDVKFDIAGTDNAFEMVKGLISQTIKDYNPSDEFWEETKQEVLKDGYTYHYWGEKIVSLYYNKQDYN

SEQ ID NO: 10 - protein, 87 aa, Unknown
  found in bacteriophage isolated from environment
LENLKMATIRATVNEFGFSSLDVKFDIAGTDNAFEMVKGLISQTIKDYNPSDEFWEETKQEVLKDGYTYHYWGEKIVSLYYNKQDYN

SEQ ID NO: 11 - protein, 87 aa, Unknown
  found in bacteriophage isolated from environment
FHCSDASSNVLETKGRQINFKVNCASIVGKFHHFTKDTLGDFIIIRRILEPLFCFLFNELITISIVIPSFFNDGQVVVFLIIVLRRL

SEQ ID NO: 12 - protein, 106 aa, Unknown
  found in bacteriophage isolated from environment
DILFMTCDFYTDTFTRSLRVDIFHNRHTLSTKRYHSDHFTVLLFKVHFNFLQSVFIERIRPFYKDSFKWLFTIFNFSVMPYFKDNLFEPVKIFFGECFSNITPVKY

SEQ ID NO: 13 - protein, 102 aa, Unknown
  found in bacteriophage isolated from environment
MTCDFYTDTFTRSLRVDIFHNRHTLSTKRYHSDHFTVLLFKVHFNFLQSVFIERIRPFYKDSFKWLFTIFNFSVMPYFKDNLFEPVKIFFGECFSNITPVKY

SEQ ID NO: 14 - protein, 154 aa, Unknown
  found in bacteriophage isolated from environment
RLVQYEPVAFKNSNNKILDDESVLFTIGCLHRYRSDYEFIKFLYKGDHYVQQVEGEAVIEGTIFNKLKYVNGVKPVTKMEPEKLAVGIKADGLLHSSEFAVHKMYAESCEWIFCHVLVKAAHRSCNLKDCIETYMEDKTSNDLMARQVIEKVKM

SEQ ID NO: 15 - protein, 151 aa, Unknown
  found in bacteriophage isolated from environment
ANSKASDRKSEYARRIVRNLMELTLKGSELHPMVLKLAKEVDHVVDIIGEEYAEVLIDKVNQQNDKQPIALRMNFENAQPHDSGRWYGDKNFSIYDGHYFHVGNAKFKELVLCQIPYETNWERVGIVKVTAIYEQTKADIIDLEQGAIIQM

SEQ ID NO: 16 - protein, 74 aa, Unknown
  found in bacteriophage isolated from environment
ESKETKKDSKKSTKKEAKQEPEKESTAKIVMDLLESLDSKLLTVPQENYFNKDLYVKFEEISPFGFIPVPTKVM

SEQ ID NO: 17 - protein, 193 aa, Unknown
  found in bacteriophage isolated from environment
SYKKPLLASRKNSEESLLAIFEDGKGKWPSFTPIHERIADIVTKLANNKLWWDSVASAVIYYAGDDTFIPESICPSIMTTIISGNNMYYTRKEVKDLLKHLDAFLSVVEKHDIDKELNARYKLLAADVEKDNFKFYQVEENVCVSINNTNITLKCLKVPSNINTQFLAVCGEVNGFHKVLTVEPQIHEHEESM

SEQ ID NO: 18 - protein, 69 aa, Unknown
  found in bacteriophage isolated from environment
LSISYIKKSLLRCKSSLFVKDSLISEKFLYTMTWSLLIVKLSDEEIVDFVITYHKVKAGIFKRFVVGIV

SEQ ID NO: 19 - protein, 97 aa, Unknown
  found in bacteriophage isolated from environment
EDNFERVFFYNVKNNGVMLDFCTNEFPKNYADYSIYPDAVQKTSLKKSSTNLLGGYLKKIAEEVVSWIIEDTIEEYLDLERELSFDCIPFVVQVKSM

SEQ ID NO: 20 - protein, 113 aa, Unknown
  found in bacteriophage isolated from environment
LHYKAEQEHTALQRELVSKYYGALQEKTLPHESIIDLGSEGLPNFQGHENVNYTEFKFLGNNVSEIPSLEVLEVTFRTYVKDGRSVVNNGVIRVLSGNRTYKFTGFDSAWLKM

SEQ ID NO: 21 - protein, 120 aa, Unknown
  found in bacteriophage isolated from environment
LLNLFLRVALCLPCWVNCNCCCIGCYRATCTSNYTGVTSCISSGCTFFGVSCSSCIEDVFLTFLPLVTCRTCCHNIQRQGLTFSDFLIGWLLSDYWKCIYSNCGCVRCDRATCTCYNASV

SEQ ID NO: 22 - protein, 154 aa, Unknown
  found in bacteriophage isolated from environment
KPYVSDLYIDAEMRRRNKLGNSTVKKGKVTVKNWWQMAEACGVKNGDNHRKIFTSDQMATIGINYTESVLADFENQSTPVKIAKNVAAVFKEVDALLYQEAQEATIKMGMKVPKGAIRITGYGITPIGASDEYAELKLGEFFKIAELGKRSLQM

SEQ ID NO: 23 - protein, 160 aa, Unknown
  found in bacteriophage isolated from environment
KPYVSDLYIDAEMRRRNKLGNSTVKKGKVTVKNWWQMAEACGVKNGDNHRKIFTSDQMATIGINYTESVLADFENQSTPVKIAKNVAAVFKEVDALLYQEAQEATIKMGMKVPKGAIRITGYGITPIGASDEYAELKLGEFFKIAELGKRSLQMIGGRSP

SEQ ID NO: 24 - protein, 55 aa, Unknown
  found in bacteriophage isolated from environment
RHVLVTFSNMVLLFKITQNITLSRLKQLILKLGIRAIPLHYFLRKIHELIMGRVL

SEQ ID NO: 25 - protein, 377 aa, Unknown
  found in bacteriophage isolated from environment
AEGAPNVTVTAANSTVSGGAGTVVCTYSGADATTAGEKTYTATTADLIDEEGKKWQYGTAGTAVVNLTLTEGETIEQNTPQQTIVPLANVTVTAANSTVSGGAGTVVCTYSGADTPLAGSKSYTANTASPIDSGDKKWQYGTAGTATVELSINGGENITQSSPQQTIVPLANVTVTAADSTVSTGAEGSVVCTYLGADSPAVSQKTYTASNASPIDEGDKKWQYGTANTALISLTLTDGENVTQGTPQQTIAPPKIADKLKANLMSFPNVRALWECYITDVDKGNIIAYQLDMFFDATRMQAGVSYLLEDSFPVKYDPKYDFKEVEAIDAEPWYSSYTLPLIAEQYTRFDYRKGAKVNAVFGKVFEKFDPYTKAKIM

SEQ ID NO: 26 - protein, 379 aa, Unknown
  found in bacteriophage isolated from environment
AEGAPNVTVTAANSTVSGGAGTVVCTYSGADATTAGEKTYTATTADLIDEEGKKWQYGTAGTAVVNLTLTEGETIEQNTPQQTIVPLANVTVTAANSTVSGGAGTVVCTYSGADTPLAGSKSYTANTASPIDSGDKKWQYGTAGTATVELSINGGENITQSSPQQTIVPLANVTVTAADSTVSTGAEGSVVCTYLGADSPAVSQKTYTASNASPIDEGDKKWQYGTANTALISLTLTDGENVTQGTPQQTIAPPKIADKLKANLMSFPNVRALWECYITDVDKGNIIAYQLDMFFDATRMQAGVSYLLEDSFPVKYDPKYDFKEVEAIDAEPWYSSYTLPLIAEQYTRFDYRKGAKVNAVFGKVFEKFDPYTKAKIMEK

SEQ ID NO: 27 - protein, 123 aa, Unknown
  found in bacteriophage isolated from environment
KKEAELHANLRFYGKHNPSVDGVVIGKVKYGKGIVYQIDMLFRGLGVIHFMPYLLNESDPINIEPKYTRQESTPTIDEEPWKSLRWTLPTPIVDNLNYREGNQVSNIYSQLFCYFDKASKAKM

SEQ ID NO: 28 - protein, 60 aa, Unknown
  found in bacteriophage isolated from environment
NPVVCLYDEQRRYNQFFLYLGIESSSYYILEVRKSEKCHNTNKGKKPKNSKRMLDGKYFL

SEQ ID NO: 29 - protein, 123 aa, Unknown
  found in bacteriophage isolated from environment
MKNRTNKGQFKKGQSGNPSGRPKGSRNKSSLVKAQLTIDNSAEFAAKLFEAIVTRDAAKLAEFGLNTDDVTIKSMIEVGKTIMTHSAGEMKAIAADTKKTPDNGGQSQTDNKPTFSAVATLKK

SEQ ID NO: 30 - protein, 56 aa, Unknown
  found in bacteriophage isolated from environment
VHAGEHLDFQFHHQLGYKMLTQEQLSKCLQQNLGYCHLFRVLGTRCLKAHPHQHQL

SEQ ID NO: 31 - protein, 61 aa, Unknown
  found in bacteriophage isolated from environment
LCSKVTNKLCTFSVVQSLFIHWTLKDYERIHLEILNISSVTTCVKFCNLALVFFSSILHWL

SEQ ID NO: 32 - protein, 62 aa, Unknown
  found in bacteriophage isolated from environment
LLYLFAPYSIGCSTNQYKAFRLPVQSTDTLSLPTAITDPKEGAVKFARSPPSFNSGILTISL

SEQ ID NO: 33 - protein, 57 aa, Unknown
  found in bacteriophage isolated from environment
LRGLFSPSLKGFLRVSFKGAEDQIQQVRMIFSSQFNFEKFKTWSGSTNLQKTVYSKT

SEQ ID NO: 34 - protein, 59 aa, Unknown
  found in bacteriophage isolated from environment
MVMRQTFNLTGDGFESLHFYQYGSVADKVMQGFHKPYEYGFDSHLNLQLWVSINGNANG

SEQ ID NO: 35 - protein, 58 aa, Unknown
  found in bacteriophage isolated from environment
HMWLKFPFIVTKWVSTSPEIGEPHELNISSEYLQSNCMGQLSPSAPELGTLLVLESTL

SEQ ID NO: 36 - protein, 59 aa, Unknown
  found in bacteriophage isolated from environment
FLLLLARSYTNKRESGFLIKLCPKKVSNYKILLSICYTESTCQPKEKVTETGDKKLPFM

SEQ ID NO: 37 - protein, 540 aa, Unknown
  found in bacteriophage isolated from environment
FYLRRRLMDLNAVKQKRVEDVRKVLAGELGLSDEVKEIIKSFGKDPSKFLPTQILTLLRYTPDQVRLIFKLMTDKNYVAPQPGSQEVFLNTNADLVLYGGAAGAGKTAALLMDSLRFIEDPNYNAVYFRRNTTQLQGGLWPAAKKLFGKFGGIPHEQKMTITFPSGATIKFTYLELEKHAEGHQGIEYSAIYFDEGTHFSASQISYLQTRLRSGAEGDSYMKISMNPDRDHFIYDWVEPFLDEEGYPDPEKCGRIRWYVMNDGVMVSDWERDKILEMFPLEIPQTYTFISGTIDDNPILDFLEPKYRGKLENNTPVNVARLRFGNWKARAEGSNYWQRQWCEIVDSLPEDVFDVRAWDLAATLPSEINPNPDWTAGVKMGKSKKDGCYYIIDVVRFRDRPSGVETQINLTAESDGKRTGIFIPQDPGAAGKSYATSLIRKLAEKGYRARAKPTNKDKVTRFAGFSAASEAGLVKVLRGSWNEAYFQELEGFCGDGKTKDDQVDATSDAFNSLNEVKLFKPPSMGAHTDLVRGNPYEGLRR

SEQ ID NO: 38 - protein, 538 aa, Unknown
  found in bacteriophage isolated from environment
LRRRLMDLNAVKQKRVEDVRKVLAGELGLSDEVKEIIKSFGKDPSKFLPTQILTLLRYTPDQVRLIFKLMTDKNYVAPQPGSQEVFLNTNADLVLYGGAAGAGKTAALLMDSLRFIEDPNYNAVYFRRNTTQLQGGLWPAAKKLFGKFGGIPHEQKMTITFPSGATIKFTYLELEKHAEGHQGIEYSAIYFDEGTHFSASQISYLQTRLRSGAEGDSYMKISMNPDRDHFIYDWVEPFLDEEGYPDPEKCGRIRWYVMNDGVMVSDWERDKILEMFPLEIPQTYTFISGTIDDNPILDFLEPKYRGKLENNTPVNVARLRFGNWKARAEGSNYWQRQWCEIVDSLPEDVFDVRAWDLAATLPSEINPNPDWTAGVKMGKSKKDGCYYIIDVVRFRDRPSGVETQINLTAESDGKRTGIFIPQDPGAAGKSYATSLIRKLAEKGYRARAKPTNKDKVTRFAGFSAASEAGLVKVLRGSWNEAYFQELEGFCGDGKTKDDQVDATSDAFNSLNEVKLFKPPSMGAHTDLVRGNPYEGLRR

SEQ ID NO: 39 - protein, 56 aa, Unknown
  found in bacteriophage isolated from environment
RGLVQFARQLDDPYQISLLRSQRLYVSRQKVSKMGVSEDANQHQLHNMCSSKWSGL

SEQ ID NO: 40 - protein, 488 aa, Unknown
  found in bacteriophage isolated from environment
MADITETQESLPPFRMGEVGSLGLKVKNGRIYEEPRQALRFPESIKTFQLMMRDPAVAASVNIIKMFVRKVNWRFVPPKGKEQDPKMLERADFFNSLMDDMEHDWADFINSVMSFCTYGFCVNEKVYKKRQGKKGKYQSKFDDGLIGWAKLPIRNQSTLDKWYFDEDFRKVTGVRQNLRNVSHIAGAINLGERPLTRKLPRAKFMLFKYDDEYGNPEGRSPLLNAYVPWKYKVQIEEYEAVGVSRDLVGMPKIGLPPDYLDENAEPEKKAFVQYCKTVVNDMIANDRAGLIWPRYIDPDTKEDIFEFSLVSRQGAKAYDTGSIIDRYSKQIMMAFMSDVLAMGQSKYGSFSLADSKTSLLAMSVDILLKQIKNVINRDLVAQTYALNMWDDEEHVQITYDDIETPDLEAIGSYIQKTVAVGALEVDKELSNKLREHIGLPPADESQPVSEKLSPNSQSRSGDGYKTAGEGTAKTPSAKDPSTANKANK

SEQ ID NO: 41 - protein, 64 aa, Unknown
  found in bacteriophage isolated from environment
ASLNGSLILVKWNIIRSGATAADTFIILINTLFTLQLNTGGFPFSCSGLISSLASKKLEKISSM

SEQ ID NO: 42 - protein, 66 aa, Unknown
  found in bacteriophage isolated from environment
LTKSYLTNLESILVFLLLMSLNQYLKSFLQIAKAAQEMVIRPLEKVLQRHLQRKTQAQQIRQINNG

SEQ ID NO: 43 - protein, 66 aa, Unknown
  found in bacteriophage isolated from environment
TLSPPIESTKVIQLNSSAGILPFGNIEPFQLSITLIGNSLEHRKPTFNYLQSFLRILTLLMSAAKM

SEQ ID NO: 44 - protein, 450 aa, Unknown
  found in bacteriophage isolated from environment
VKMSSNIFRLADRLFNQPLLATESLAHSAATYVNNRLLGDVQAAVNFDKPKGEARSLLKVKDDIAIIPIMGGLTHRMTFIDAMCTGGLSSYEGLRRGFDEALADESIKTIVLHIDSGGGEASGCFELARHIMASRGQKKIIAYVDEFACSAAYALASSAEEIIASPDADVGSIGVIMVHQELTKAFEKNGVTINVIKAGEFKGMGSPFQALSEESKERLQKRINDTYATFTGFVAESRNLSEEAVKNTEANVYSAQEALELGLINSIMSQDDFLNYLQGSEEAPVSLNVNNSGEEMTEQEKQELEALRLQVAQMKAKEQEAALSDLTNKISASAEAFGFDAKEAATTILGAGLDNPLSVLFMNAMEGANQKLNETIASHASAMEEKESEITKLKETAGAVLEHSNAMEEMGNDGEADLVEEEKEPAKNASEDTAEQRKLALQNALKSLIK

SEQ ID NO: 45 - protein, 448 aa, Unknown
  found in bacteriophage isolated from environment
MSSNIFRLADRLFNQPLLATESLAHSAATYVNNRLLGDVQAAVNFDKPKGEARSLLKVKDDIAIIPIMGGLTHRMTFIDAMCTGGLSSYEGLRRGFDEALADESIKTIVLHIDSGGGEASGCFELARHIMASRGQKKIIAYVDEFACSAAYALASSAEEIIASPDADVGSIGVIMVHQELTKAFEKNGVTINVIKAGEFKGMGSPFQALSEESKERLQKRINDTYATFTGFVAESRNLSEEAVKNTEANVYSAQEALELGLINSIMSQDDFLNYLQGSEEAPVSLNVNNSGEEMTEQEKQELEALRLQVAQMKAKEQEAALSDLTNKISASAEAFGFDAKEAATTILGAGLDNPLSVLFMNAMEGANQKLNETIASHASAMEEKESEITKLKETAGAVLEHSNAMEEMGNDGEADLVEEEKEPAKNASEDTAEQRKLALQNALKSLIK

SEQ ID NO: 46 - protein, 125 aa, Unknown
  found in bacteriophage isolated from environment
MAYQDFTKLGKREPLNDIILWEQVTPTGHSRKEYTPQASTEYRVGEVLKEDGTKVAAGEEAQADSVCIVNFYSDLQLSYHGQLKVVGIYRDAELKDMLTLESGVNAENVKKALAAKGIDFVPTGL

SEQ ID NO: 47 - protein, 150 aa, Unknown
  found in bacteriophage isolated from environment
IFALSCSAAKDSKVLLIEAEASAKPNSAFSAAVVIKPAPRSLGRLTRNIFAISPALWFSLSVIADWAEAISSFSDSIVLSFSVAPATRSCELAISSIPLSPSASKTSSSFSGALFAESSVASCRLSARWFARFDRILYPVCYHCILIKSL

SEQ ID NO: 48 - protein, 374 aa, Unknown
  found in bacteriophage isolated from environment
DILENFTMLTNSEKSRFFLADLTGEVQSIPNTYGYISNLGLFRSAPITQTTFLMDLTDWDVSLLDAVDRDSRKAETSAPERVRQISFPMMYFKEVESITPDEIQGVRQPGTANELTTEAVVRAKKLMKIRTKFDITREFLFMQALKGKVVDARGTLYADLYKQFDVEKKTVYFDLGNPNADIDASIEELRMHMEDEAKTGTVINGEEIHVVVDRVFFSKLVKHPKIRDAYLAQQTPLAWQQITGSLRTGGTDGVQAHMNTFYYGGVKFVQYNGKFKDKRGKVHTLVSIDGAGAEVGVGHAFPNVSMLGEANNIFEVAYGPCPKMGYANTLGQELYVFEYEKDRDEGIDFEAHSYMLPYCTRPQLLVDVRADAKD

SEQ ID NO: 49 - protein, 372 aa, Unknown
  found in bacteriophage isolated from environment
LENFTMLTNSEKSRFFLADLTGEVQSIPNTYGYISNLGLFRSAPITQTTFLMDLTDWDVSLLDAVDRDSRKAETSAPERVRQISFPMMYFKEVESITPDEIQGVRQPGTANELTTEAVVRAKKLMKIRTKFDITREFLFMQALKGKVVDARGTLYADLYKQFDVEKKTVYFDLGNPNADIDASIEELRMHMEDEAKTGTVINGEEIHVVVDRVFFSKLVKHPKIRDAYLAQQTPLAWQQITGSLRTGGTDGVQAHMNTFYYGGVKFVQYNGKFKDKRGKVHTLVSIDGAGAEVGVGHAFPNVSMLGEANNIFEVAYGPCPKMGYANTLGQELYVFEYEKDRDEGIDFEAHSYMLPYCTRPQLLVDVRADAKD

SEQ ID NO: 50 - protein, 149 aa, Unknown
  found in bacteriophage isolated from environment
MCYTGDPANNPLDRVRILCTDTNNDEILIEQSVLEWFYLESGKDEKKAAIKALKYLLFQVAKMGDEKVGGVYLRNSSRFKSLKAVYDDLVKSSVSGLPYAGGINQCDIDMRRQNPCSVKKYTEYGDAARYEGRDYCNRVNGVFIIERDE

SEQ ID NO: 51 - protein, 68 aa, Unknown
  found in bacteriophage isolated from environment
LFMTTLLKALFQDYPMQVVLISVTLICVVRILALSRNTQNMVMLPDTKAEITATVLMAYLLSSEMNNG

SEQ ID NO: 52 - protein, 133 aa, Unknown
  found in bacteriophage isolated from environment
MRLLNRHSFVVKRKVSEDGYYNDDGDWVASQDIVEVNCKGNIQPYIKGSVKNGTQIALPEGIRLTDTRILYTTYKLRTSDDVEWNESDIVMIDGHEYEVFMTMDWSQQLAHTSHYEYIIIRRDKMNAVRNSRT

SEQ ID NO: 53 - protein, 450 aa, Unknown
  found in bacteriophage isolated from environment
MWNPIVNVDITLNTAGTTREGFGLPLFLASTDNFEERVRGYTSLTEVAEDFDENTAAYKAAKQLWSQTPKVTQLYIGRCAMQYTVSIPDEVTESTDYSITVAVGGGMSQPFQYTSQGEDTAENVLQQFKTQIEADQSIKDKVSVNVTGSNGSATMVISKAGDNDFVKVTTTAQTVSIASTTADTASTALAAIEAYSTDWYFIAAEDRTQQFVLAMASEIQARKKIFFTANSDVAALQGTELNSANDVPAQLAKSMYTRTVCLWHHTAAEDYPEMAYIAYGAPYDAGSIAWGNAQLTGVAASLQPANKRPLTSIQKSALDVRHCNFIDLDGGVPVVRRGITSGGEWIDIVRGVDWLESDLKTSLRDLLINQKGGKITYDDTGITRIRQVIETSLQRAVNRNFLSSYTVNVPKASQVALADKKARILKDVTFAGILAGAILDVDLKGTVAYE

SEQ ID NO: 54 - protein, 150 aa, Unknown
  found in bacteriophage isolated from environment
IGMAMYQQYSPKDVVCSWNGIAIEGFAPDSFLRLQRTSPLITPVVGAGGQVALTRNADKTGTIEIELMQTSLSNQMLSAIQAKQDNMELEEDISSNFVIYDPSGSVLATGINAWLQELPQIELGRDQNSKTWIFGCEKLDYTSTIPASSV

SEQ ID NO: 55 - protein, 148 aa, Unknown
  found in bacteriophage isolated from environment
MAMYQQYSPKDVVCSWNGIAIEGFAPDSFLRLQRTSPLITPVVGAGGQVALTRNADKTGTIEIELMQTSLSNQMLSAIQAKQDNMELEEDISSNFVIYDPSGSVLATGINAWLQELPQIELGRDQNSKTWIFGCEKLDYTSTIPASSV

SEQ ID NO: 56 - protein, 106 aa, Unknown
  found in bacteriophage isolated from environment
LLSICAGGKLRKFFRSKHFQKPNFSVNMGNTLQTPLTDAAVEATYEEADEMKFVLAIYGMEGCKETLDQLFAMTFSDLLSLRQFLEIQRSYKEEIAYNELRRAGKM

SEQ ID NO: 57 - protein, 746 aa, Unknown
  found in bacteriophage isolated from environment
RKNVMAQYTVDSFIVELGFSEKVVKGLQRVEKMSMQAAQRIERNINKAFDVKPNKSSQEALNRIVKNAQSASGRINKALNSSLNLDSQGVKSLKKLETQAKKTAKGINKSLRDAMKVDGKITIKTGRGRGGQSIPPVGGGAPRGPRVDVAQRQMERMFNNNFYSGLTRRLETIGGQGNQMAASFRGSLQNIYNRYKGTGKVGEYEMEVKKLIDVTKRWVIAENARLKSVKESAWLQDRANASLRQLVGGFVSAYALLELSQKTIEAGVKRQSAQLASTAIFGADTQQARMFAASFAHQIGQNYTDTMKQYSNFAAGAQPTLGFQGTQEFYKNAAMFARIRGATDEDLKGIMVAFQQMASKGKVQAEELRGQLGDRLAGAVQLFADAIGKTPQELDKMMQDGKLLAQDVLPKVSERMAELVKQAGGMNAVSKQTATSMGQAKAMWDNTLVALFNNSSEGISQLSNSVAMFLQGSMGSTQALGLVIGNLLKGASNLLDFITDFMYRTSALYYYARAWYKDLDNSQQKLIKSAGEFLGTVVTIGGAVAVVSKAVKLLSGLVGGGIFGKILQRLGVSAAGTAAAGEAAAAAGGVTATRMALGTVGSALMLRGSTDPNAAKNYSEVTLPKPFENAVANITNPKRPMFFDENGQLQFAQYTQDVEGNRKLIDNGLSNWEIIMEKLSTSIDNFANKFNQTPMMMTPSGLPMQTKQTLNVTFNLDGKQIATKMVDITDKNQEDILLSSSYPEEE

SEQ ID NO: 58 - protein, 742 aa, Unknown
  found in bacteriophage isolated from environment
MAQYTVDSFIVELGFSEKVVKGLQRVEKMSMQAAQRIERNINKAFDVKPNKSSQEALNRIVKNAQSASGRINKALNSSLNLDSQGVKSLKKLETQAKKTAKGINKSLRDAMKVDGKITIKTGRGRGGQSIPPVGGGAPRGPRVDVAQRQMERMFNNNFYSGLTRRLETIGGQGNQMAASFRGSLQNIYNRYKGTGKVGEYEMEVKKLIDVTKRWVIAENARLKSVKESAWLQDRANASLRQLVGGFVSAYALLELSQKTIEAGVKRQSAQLASTAIFGADTQQARMFAASFAHQIGQNYTDTMKQYSNFAAGAQPTLGFQGTQEFYKNAAMFARIRGATDEDLKGIMVAFQQMASKGKVQAEELRGQLGDRLAGAVQLFADAIGKTPQELDKMMQDGKLLAQDVLPKVSERMAELVKQAGGMNAVSKQTATSMGQAKAMWDNTLVALFNNSSEGISQLSNSVAMFLQGSMGSTQALGLVIGNLLKGASNLLDFITDFMYRTSALYYYARAWYKDLDNSQQKLIKSAGEFLGTVVTIGGAVAVVSKAVKLLSGLVGGGIFGKILQRLGVSAAGTAAAGEAAAAAGGVTATRMALGTVGSALMLRGSTDPNAAKNYSEVTLPKPFENAVANITNPKRPMFFDENGQLQFAQYTQDVEGNRKLIDNGLSNWEIIMEKLSTSIDNFANKFNQTPMMMTPSGLPMQTKQTLNVTFNLDGKQIATKMVDITDKNQEDILLSSSYPEEE

SEQ ID NO: 59 - protein, 65 aa, Unknown
  found in bacteriophage isolated from environment
AFAIHSLVSTASNLLELSPMECNDLETAINKCPEIPLVCAKPRTIPFRNFPALLRSSKMVSKMYL

SEQ ID NO: 60 - protein, 103 aa, Unknown
  found in bacteriophage isolated from environment
QYLSRSLLWCFSILLAPSNRPVTTVIPPATATTDFATLSRLPKTPPPIKPLIKCLSPTLAAPVAAAPSAAAAAPPTVAVLIASPVTPEANISLPEVSGFAALF

SEQ ID NO: 61 - protein, 75 aa, Unknown
  found in bacteriophage isolated from environment
STSPLLFNISLPRDLQSIIMSFSDVDISLKALLNLWVGIIIVGEPKGICVLCVRFTVKLRSPLCIAVLITSIVSL

SEQ ID NO: 62 - protein, 113 aa, Unknown
  found in bacteriophage isolated from environment
MSQYIPVPDTGWSTQTVTLDGTVFVIELKYKERLDRWFLTLSDVDGNVLLSEKKCLADQSITGRYVIPSLAGELFVERMYGTDLQPTRNNFGREKAFELNYYTQEDMRLMENL

SEQ ID NO: 63 - protein, 139 aa, Unknown
  found in bacteriophage isolated from environment
MKTDFALNLGGDYVATLGSDSVYVAHGDLKITGNQIRIIPEDDKATQVAQRLHIRCLLRAGEVFFNTSAGFPYLQLAKFKQKTSIFDNYMKAYLVETRDVSNIYNYSSSMDNAQRKVTVNFDATTTTDILTDITQEVNI

SEQ ID NO: 64 - protein, 489 aa, Unknown
  found in bacteriophage isolated from environment
MAGLTTTGLQTLRYQEIFDNIKSRLLRDISPNLDVSEDSQLGLFLASIARSLADTHEILSEIYDGGTIDKAEGFNLDDITALNAVYRYVAQATRGQVEFTGTTGATIPSTTRLRSTAGNIFYPVSNITLTPSYCVEAILEVNSLRTDANYVIIIDNVIFSYQPKSSDTITVLLTELANAINGGIVAKAEVINDGSALRVYKDEGDIIARTNPMVVTATTFLTFTKITTIHDVVAEEVGAIPALAGTLIEIETTVDGLDSVYNRYGLTTGRNEETDTELRQRYLESLSVTGVGTLDAIVAAVKRVQGVSDASGVENDTEETSSEGLPPKSFKIVVVGGQNDNVAQAIWDTKPAGIRAYGAIFGTAYDLGGLSHNIYFSRPTPKYAFVKVSYSLYNEESLTIPEEDIRDSIIQGINAYGRTLKVGNDVIPNRIYGYIYNVIKGIEINEIKVALSNSQSVPPSDGQYTTARITVDGDQYTVWESSKYTITKE

SEQ ID NO: 65 - protein, 489 aa, Unknown; identical to SEQ ID NO: 64
  found in bacteriophage isolated from environment

SEQ ID NO: 66 - protein, 75 aa, Unknown
  found in bacteriophage isolated from environment
LTMLPISILSILTASDLLWDTGGLSPCYVVALIVTSPSWYVTHSLLLYVMVLSHYHKLFNIINIVLSKIFPSNCL

SEQ ID NO: 67 - protein, 396 aa, Unknown
  found in bacteriophage isolated from environment
ICRSLIMAVGEIQISALPQASLPIDLSDIFHLKQGIEDKRCTLEQLLAPHASLRNNPHGVTKTQIGLDNVINALQLVAANNLSDIVNVAEARANLQIMSSEEVNNLVQQHIKDKSNPHNTTKAQVGLSNVQNWTTSNLYNEDADKYATARAVNNLYKAVQASYPVGTIHLSMNSANPSTYLICGGTWELVSKGRALVGYDSDTRPAGSVFGASTVTLSVNNMPQHSHSVSLSGGGHTHNATVSISAFDYGTKTTNSFDYGTKATNTTGNHTHSVSGNTSTNGTHNHDVYPRENDGTGNAVADSDGGGARRTSRTSSDGAHSHSFNVTSGASGDHSHTVGIGAHSHTVGIGSHTHSGTVTVSSSEHTHSGNTNSVGGGQAVNIEQPSFVLYVWQRTA

SEQ ID NO: 68 - protein, 390 aa, Unknown
  found in bacteriophage isolated from environment
MAVGEIQISALPQASLPIDLSDIFHLKQGIEDKRCTLEQLLAPHASLRNNPHGVTKTQIGLDNVINALQLVAANNLSDIVNVAEARANLQIMSSEEVNNLVQQHIKDKSNPHNTTKAQVGLSNVQNWTTSNLYNEDADKYATARAVNNLYKAVQASYPVGTIHLSMNSANPSTYLICGGTWELVSKGRALVGYDSDTRPAGSVFGASTVTLSVNNMPQHSHSVSLSGGGHTHNATVSISAFDYGTKTTNSFDYGTKATNTTGNHTHSVSGNTSTNGTHNHDVYPRENDGTGNAVADSDGGGARRTSRTSSDGAHSHSFNVTSGASGDHSHTVGIGAHSHTVGIGSHTHSGTVTVSSSEHTHSGNTNSVGGGQAVNIEQPSFVLYVWQRTA

SEQ ID NO: 69 - protein, 690 aa, Unknown
  found in bacteriophage isolated from environment
PLLRGKFIMADYKLSELNSIDTIRSDDLLHVRVKKRPKMLGDEDRRMTYQDFLASFKLERFVQIAGSTMTGDLGIVKLLYGGKAVFDPTGSSEITVGDVLKTFKINANGLKLTIADASRSATVYHTLNKPSPNELGMRTNEENDARYARLAVNNTFRGTQAILSDNEALIIKNITQGAPLYLRGQDADGTNRWYLGNDNRGTNNLVLKNVKSDVSIAILENLVTVNKTVRITGQVQPSDWTNIDSRYIPAATLSNLAKLSDVNTFRSAQIINQNGLLLQLKNTTQDSQLYFAGFNADNVRRWYIGNGEQKPESFVIHNDRTATTIFMVNDFLLNKTVRITGQVQPSDFSNLDARYYTQSAANARYMLASITGSASEADGGDGVAWDAKTGLYKVTNTTGQSSSLVYHMFLGTGSTPSAQLKFSFKNGGMWYRTSRDAYGFEVNWSKVYTEAQKPTPSEIGAYTKAETDQKIATAISDSTDLNKIYPVGIVTWFNSNVDPNTALPGLTWTYLNNGVGRTIRIAAANGSDVATTGGSDSVTLSVGNLPSHTHSFSATTSSFDYGTKGTNSTGGHSHSVSGTTSAAGNHAHHLGLLLVNGGDAQYGYTTVSNSKTRTLDWLDRRDNKFPNTNTTGNHTHTWSGTTSGAGDHSHSVGIGAHSHTVSGNTGSTGSGSAFSVTNQFYKLMAWVRTA

SEQ ID NO: 70 - protein, 682 aa, Unknown
  found in bacteriophage isolated from environment
MADYKLSELNSIDTIRSDDLLHVRVKKRPKMLGDEDRRMTYQDFLASFKLERFVQIAGSTMTGDLGIVKLLYGGKAVFDPTGSSEITVGDVLKTFKINANGLKLTIADASRSATVYHTLNKPSPNELGMRTNEENDARYARLAVNNTFRGTQAILSDNEALIIKNITQGAPLYLRGQDADGTNRWYLGNDNRGTNNLVLKNVKSDVSIAILENLVTVNKTVRITGQVQPSDWTNIDSRYIPAATLSNLAKLSDVNTFRSAQIINQNGLLLQLKNTTQDSQLYFAGFNADNVRRWYIGNGEQKPESFVIHNDRTATTIFMVNDFLLNKTVRITGQVQPSDFSNLDARYYTQSAANARYMLASITGSASEADGGDGVAWDAKTGLYKVTNTTGQSSSLVYHMFLGTGSTPSAQLKFSFKNGGMWYRTSRDAYGFEVNWSKVYTEAQKPTPSEIGAYTKAETDQKIATAISDSTDLNKIYPVGIVTWFNSNVDPNTALPGLTWTYLNNGVGRTIRIAAANGSDVATTGGSDSVTLSVGNLPSHTHSFSATTSSFDYGTKGTNSTGGHSHSVSGTTSAAGNHAHHLGLLLVNGGDAQYGYTTVSNSKTRTLDWLDRRDNKFPNTNTTGNHTHTWSGTTSGAGDHSHSVGIGAHSHTVSGNTGSTGSGSAFSVTNQFYKLMAWVRTA

SEQ ID NO: 71 - protein, 58 aa, Unknown
  found in bacteriophage isolated from environment
MLDTIPNLPQTQDICLQASLVRLLKQMVVMVLHGMQKQVFIRLLTPLDSLLHLYITCF

SEQ ID NO: 72 - protein, 61 aa, Unknown
  found in bacteriophage isolated from environment
MVGCGIEHQEMPMASKLIGLKFTRKHKNQPLQRLVHTLKLKLTRKLQQQLVTLQTLIKSIQ

SEQ ID NO: 73 - protein, 12 aa, Unknown
  found in bacteriophage isolated from environment
PNTALPGLTWTY

SEQ ID NO: 74 - protein, 85 aa, Unknown
  found in bacteriophage isolated from environment
NITTISLITVCSNAVALCSSKVPKISSIVLERVSVCSTVMCVRPRTSCATSTVMGVRYTNTSMAVCNTTVSTACTRTRCKTNSVL

SEQ ID NO: 75 - protein, 63 aa, Unknown
  found in bacteriophage isolated from environment
LYTNLKSRCMELFIVHQFINLLHMVLINLSISKDTYQVPWSVSSHLTKNFQNKTIRRNIKWKP

SEQ ID NO: 76 - protein, 299 aa, Unknown
  found in bacteriophage isolated from environment
KGVSLPAEIKGAHQYNNIGGIFDSATLHKLDSLTNLQVGIEFTPAHFEENNMLEYVQKMHNQYIQTDGFVGILYRPTYGTMKCLVELIFGYSAINFPLGLFTDVSRQYWQLDVEGENTIYIQFLVHCPALAMSNAAIDAANWANVLMYRDTIDGKMKTVLTELQDVVCGNHGEFSRWQVGYIRGGADELWDQESSYNSSLWRKFDDSWITWREGDNEGWTRYRLEGLKNEGNLFWLAEGIVQRTFVQKSTLLPFGTRMDFRFQPPAFASIVDGTRTTRLEGVSLVHNLINKYSSDAQSM

SEQ ID NO: 77 - protein, 173 aa, Unknown
  found in bacteriophage isolated from environment
ISKVALPSSDGFDCTFVNTRLSYSFSKKFSKGKCTVASSVTLWKTVWNTTPAYGKALTRTPAPPITKTSSSIELSRYFKNAPNDSLLALAYITSSLPKSMPKYGTEFVKIRLARSGRGLLPRVLKVSLPMTTKLFLVSLLNSCMSCLCRGHGIPVGVPNSPFSPLAKINLIIL

SEQ ID NO: 78 - protein, 181 aa, Unknown
  found in bacteriophage isolated from environment
FHGKVQPVYIEFTAKGDESPKSQVKTFVRNDYLKEFFNEFPLHVTAEETVKHFVTHFVVGAYPLANVLVGAGGIVFVDEDISSDLYKLFAGFSEKSAKAYMVDDKGFDIGLYPVSNTLILSAREPLPKSGLTKFTENGMVVLNNKTLRKFEQMDQKHRPWPMGTPTGFEGNEGSAFILKIM

SEQ ID NO: 79 - protein, 71 aa, Unknown
  found in bacteriophage isolated from environment
MWTTDRCSIRLIAVFNFHLFNLKNWFKNQYKVYTVIFFIQNTIKVLRYKVEEAHRISVRSNPDSVPYILYS

SEQ ID NO: 80 - protein, 86 aa, Unknown
  found in bacteriophage isolated from environment
KTFGKKIFWNIVSKVVKSRHYIFHPSPQYSGYAWFAIIENCGTCRTSEEAIHGNVIESVEGQLDTCGCHPCRIPTGDSEYCHEIKM

SEQ ID NO: 81 - protein, 109 aa, Unknown
  found in bacteriophage isolated from environment
DALRLNFNVGFKECVELMYELSVNGTLHIINSVRAQSIGCIKAVQEQSLGRSKIERKFRHAVFDRMEDVDMPCIYSEMEAERDAEWDDQPAYPDFVENMKRRGNAHLTL

SEQ ID NO: 82 - protein, 70 aa, Unknown
  found in bacteriophage isolated from environment
EDKKKRKRSTDILSDINTARVKEREDNLYDDLAKEIQSDDQCIVTFVTFGDTDDIIKGYGSRPHLKKLAM

SEQ ID NO: 83 - protein, 124 aa, Unknown
  found in bacteriophage isolated from environment
FYRKTTKAWTPITYTTKVASIFQNHQEFFFGDLLFIEHQTKLYRPVTEDWTVAHNSCCANLNRFSIDKVWILSKFLWVCWAVLDSHWEDYICQHNGSVNHLTKFVEFCTRLDTSLNHLTVHNKT

SEQ ID NO: 84 - protein, 89 aa, Unknown
  found in bacteriophage isolated from environment
LTRPDLTLPCHTVPNRTLPYLTSLKNPLRRLLSDAGEYPLVYAAQYTHQIFYVNNFLYKSPDSYMCYKTEDCEQNTHCKRCVQKLTCNV

SEQ ID NO: 85 - protein, 384 aa, Unknown
  found in bacteriophage isolated from environment
EYDRIALGVPFQLSGKRTMKQFQVTLPKGIFEEPHEALYQKKEHTTKWSVDVFVNPLTEVVFKGHGRKDTKVGTVKFEETHMKKHKILFYSRHCCEYFSDESISRYMAGEFKAEVWKDHAEDFEEWSNVRRSKVPVVKCGDRFDNLPSTEIIDRREPWTKTSDCIDYWYFKLLHRDPNDENKIMSVIDELDWGHAYIEGDFEDVDKHLRLMAMIDPILETPIKYVTNERSYATFVSGISLHRSIRCRVGDLKPQADAPFKLYKAHSVKAADHALQVGVKETNQASDKTYAYGKRDVQKKYKAAVEFLAQQEANRENKKGINKPEATYEEFMMKGNEKGYTTIVKDGVAVCSWVNFSGDKNQKYLITMKLRQTIGLTAPMVHTFS

SEQ ID NO: 86 - protein, 90 aa, Unknown
  found in bacteriophage isolated from environment
LTIFAISIRCCCLRVWASDNNNIPAYSIPIEFVDFAVLHLWREAVRGIFVFIRWVTASQKNYSKCNHCFHTTLNLIVHDNLPLCMFLNSE

SEQ ID NO: 87 - protein, 101 aa, Unknown
  found in bacteriophage isolated from environment
KRKGGIEVDIVQVDGAVDFKHIISEVTYTWGEIRVLEGERPVIPNRQAVTATSYVVDYCYIYHVLVQMNTEDMLLLLTHNVMKAMDILHQQKLTQADSLLL

SEQ ID NO: 88 - protein, 188 aa, Unknown
  found in bacteriophage isolated from environment
SLKAFEGHLKIAAECYAKHAEEPTDFMGLHYNKGQLRIMARFRKSIKQVGKPLGSPSERSRNCSNQSATCVRLNLYRNDWGDGNKHDVQLTKDPLYGDMYLIVLRNAQYGRGDILLQVSKHGDTNTRYNGARKGGFRSNFNANGERFKWTFVGTEPDYDLLEKLRIETIMEVGDIYKWGARVLRAQAL

SEQ ID NO: 89 - protein, 119 aa, Unknown
  found in bacteriophage isolated from environment
MELHKLFISFPTIDSLLTHPERCFFSSHVGFISVYATLLKLEILIIKCPFSFGVNTDIFYNTSEDFCIPHTPMFNLWFTNTNTSTPCSQAMSTFITLWSWSIHPLNTRLDKRILKEITP

SEQ ID NO: 90 - protein, 910 aa, Unknown
  found in bacteriophage isolated from environment
HVELWSKGVKGTGTVLTESKLGLNKSAQGYMWDTIAKVEQTMSEPCEWSNEDHYALLLRAGIAPKRGNLKTLGEECARRCALNIAENQIQAESGMLLYNLLKHPSKCWLWAGAVKVFGGKSIAATKGFVEELAKKTAKYDAELDDLLKKIKPLRIFYTQKTLAGEQTTAAKITKAFKEDGAGFLLAYIGNKAKKRGKSIEHLLNEDQTARCTLIDQEDNLNFYISNLTHADTGSYVVYLDNESDYRLYKDIEPNLYEDFHKCYYRGDEQRIFEIEEKGQTVAKTFDKDGMFNCLLVLQASNMDVSVVNTGEECIWVARMPEGYVAAGSPVNVIGYQTMRGTSTGFVMAGASLRGDPRIQNLWGKEDDKSNEITRRRHMLTYYKAIKQGLEGEITDYSSETLKPSTRILCPELLDTYKKVSWNHEIYQVGEHEVYSLGCREVMEQWKPHKTIMKKNDKFRCVKVPRGDSDKKYNWDDPIWGVSKLYDKVVAVQTMRSVEFEIPTYPADILGTYRSSELEFHNVVHSNYYKVTKVTKVPKWDKCKKGIKANLENCIARADKMAVFGEKYEEGTVSNTPTYCNRKEINFIKTTPKGFPKIEYTQMEGNRVQQRYKTKPYKTIRKLGDAHGFTEVYENWAKAFEEGTVKGKTKITPPLHPEVESALENTLKDLEKVHFEMLEKDAKWGNIAQQSMWFSTEKARMYTEYTDIGCKKLKLYENDLARKTKANIRIDEVVRTFIEANWVGWHEIEPKRVGVRAGWAALGHAGKYGKPTPRDMWQVRSQILSDQFFNSWPKCKPNDFNWLDPAIHNFVWWDYGLGNHICLRKAKLAFEIGERLGGKIYKTYKHGLIPEDTFVWVPPEEDDSKYDAFAMVHVKTFELLLGDTETDGVLHLNKFDVNEMKVGELIMLRMC

SEQ ID NO: 91 - protein, 154 aa, Unknown
  found in bacteriophage isolated from environment
DKRLKLNSYLKEAYMQKMFVHPDIADFVRALQKLEELDIAAQREYAHHHRRMVDIQHEIELSENYEDDLKCSVFEHMKDVATARRKAKDTVALLDSLKKRLQSGTDLCNLASLINDVETSWDRHYYPRSEKTLDFSSSENLKCSRKKLNQLREK

SEQ ID NO: 92 - protein, 270 aa, Unknown
  found in bacteriophage isolated from environment
ERNNMNIDVEKMLEEKGIDEAFLINAVESMAMILRGNNYTEQFMPASYNLPEDKSDNGAFAEQVNMMLCDKTLALASIVVGVDALAEFIFYEMQKNDYIAMTTEEKDLLLLAGNDELIDLLISSTSAVMAALEKRMEEKLSRYEKLDWGVEELNPRIKEIIQQTKESLEEAVENDSVADIEPLQVKVALMIPAISTMMNIVALIQLSQMMGVSIEFIEEMTGGVSMQAINDVLVNIGASIIEEKLRINFGDDFVKQISAMAEKEYAEQLH

SEQ ID NO: 93 - protein, 247 aa, Unknown
  found in bacteriophage isolated from environment
MSNIIAFTGKARSGKDTSCSIVKNILEDEHGYNVAVMAFADNLKLSASKIFDLTWNDLYGETKETPQVFDLSYPELMFKVTEAMEFTFRDERYHMDFKLMSELTGRLIMELKKVAKPTLLTRLGFSKKYKFSSRQIQQIWGTEVVRKVMGDKFWSKDLEKRMVRFYESCSLRNQYGFVLISDLRFDSEAEWLSRFAHQTIEVKRDNVDKISSHVSENGLSTKYERDIIHNNGTLTDLENKLRAIIKV

SEQ ID NO: 94 - protein, 670 aa, Unknown
  found in bacteriophage isolated from environment
RQNYNEEVLMSKGRKLKEAGQFVGHCACPRCGSSDAGSIYHHDDDSYSMTCFSCNKGFPEWDFDKGQIVSTYSTGSDNKNRTFRGMDLDDVKDNLEAMDLKDRKIPAKVLERLGIKVDIDSDGEIDAHFYPTYKRNEDGKLEHVGYRVRHRYPEDHPKEHLRGKLKDFSGGVGDIKGELAMFGSWIAPEGGNRLFIWEGEMECATAIYMTSLAIKDKSRRKNYCHVSVPSGANIKSIKDNYQYITSFDEIYLCFDNDEAGAKATKEAAGILPIEKVRLFQYPEGVKDLNEWWTKFYKEKDTVLEGFKQRIYNAPRYCPAGIKNFADGFEAMKNRGQIPLIPFPESFGDLNRLTYGGYGLGEITTIAAPSSVGKSAYTREMIYSAWKETDYNIGVIPVEDTYEELMEMLCAIHLSKQISEIPYDERDWDELKGAHAELSKGRRIHIVDHQGAIDQDNLLEFVDYLVNSLDCKIIILDPITLALSRSDTDEEEVLSELLRRCKRYQYAQVNVCHVRKSAGGQKANSEGGDISEEDIKGSGAYFQISMNNILLMRNKVDPDPVKKNLTKIKLTKCRRHGKSTGIAGHTWYNPDTGRLIKASGCGVDIDGAAENIRQQFGIGEAEDHYDDSLPHYEDEVFDRETGEVYTEEQRQSSTIPPVLSEDADDCPFETE

SEQ ID NO: 95 - protein, 661 aa, Unknown
  found in bacteriophage isolated from environment
MSKGRKLKEAGQFVGHCACPRCGSSDAGSIYHHDDDSYSMTCFSCNKGFPEWDFDKGQIVSTYSTGSDNKNRTFRGMDLDDVKDNLEAMDLKDRKIPAKVLERLGIKVDIDSDGEIDAHFYPTYKRNEDGKLEHVGYRVRHRYPEDHPKEHLRGKLKDFSGGVGDIKGELAMFGSWIAPEGGNRLFIWEGEMECATAIYMTSLAIKDKSRRKNYCHVSVPSGANIKSIKDNYQYITSFDEIYLCFDNDEAGAKATKEAAGILPIEKVRLFQYPEGVKDLNEWWTKFYKEKDTVLEGFKQRIYNAPRYCPAGIKNFADGFEAMKNRGQIPLIPFPESFGDLNRLTYGGYGLGEITTIAAPSSVGKSAYTREMIYSAWKETDYNIGVIPVEDTYEELMEMLCAIHLSKQISEIPYDERDWDELKGAHAELSKGRRIHIVDHQGAIDQDNLLEFVDYLVNSLDCKIIILDPITLALSRSDTDEEEVLSELLRRCKRYQYAQVNVCHVRKSAGGQKANSEGGDISEEDIKGSGAYFQISMNNILLMRNKVDPDPVKKNLTKIKLTKCRRHGKSTGIAGHTWYNPDTGRLIKASGCGVDIDGAAENIRQQFGIGEAEDHYDDSLPHYEDEVFDRETGEVYTEEQRQSSTIPPVLSEDADDCPFETE

SEQ ID NO: 96 - protein, 95 aa, Unknown
  found in bacteriophage isolated from environment
MQMTARLKLSDSYKREGFIPFFEEKSLNEFQEECLTKVDRFYRMLYMKCDGGVEVEEKFHHSMITVTITIPRHNIGWLFIIKENVFEYQVYRRIS

SEQ ID NO: 97 - protein, 49 aa, Unknown
  found in bacteriophage isolated from environment
MKHSKAFEQVFGDSLKATAGKPAKYYEEKRVRTGKTARKAASKDKHNFQ

SEQ ID NO: 98 - protein, 285 aa, Unknown
  found in bacteriophage isolated from environment
MSKVVKMKAPVEKYNGTERQTLRYLLKDVWFYYLNTSPRPGKGKSIDKKFPGKDCNYSVSILAEDGNKLFKEFTKSKKNPEGWDKVTTEAVDADDFEEKFGCKPPFEADTYYILKVSRAAAYKDGAVWTAKQSFPVMLIEEVNGKRVAVKQPMKKIKAQASDKHEDDKNYDVIHPDIAVGNGSFGSVILSTHFYTFENNVLTKPIQEQFIIDTLVPYTGGNGANGEPELDEDELAMLGLDGVEDNGEITEEDATDHKPSNNSDDGDDEDLPDPDDEEDEDFDTED

SEQ ID NO: 99 - protein, 359 aa, Unknown
  found in bacteriophage isolated from environment
LYLVWGFFIWRVTMEKYTLTKLPDSVTHVFIDSDSIAYKGACVVEKAKYKYVNKLTAEESEPFDNAKDAARWLADQRILVEELGLTFDEDEWERQTWKEAKSEKEAIMATQQVLQEWLKVVGKERTWVGYLTEKGVHKHKDIKGLEHQYQGNRKDAVTPTHLVACREYLLSRPEFKLLKGGFEADSIVIAKAEKMGKKAALMSIDKDLRQAEGTYCIDMTYEKSPLIFIADNNVGDIWDCPIKSKPKAAKTVGVGFKFLCYQAVAGDNADNYFGLKGAGKVAVMNALDGKETYKECLDAIYELYAKKESYTYVSWDGQTVTKTPLELMEQHFWVAYQERNPKDNFSFKKYNWEPCMNED

SEQ ID NO: 100 - protein, 165 aa, Unknown
  found in bacteriophage isolated from environment
MKIKGFGNCPTYGHWVSLCGEVDPTKHFGFVYLVYCKKTGQYYIGKKQLNSVTKRKVAGKTRKKVVTKESDWMTYETSSEYIKKDIESFGKEFFDFYIIQTYHTKGGLVYGEANLQHKFDVMTKRIDSKLRLFYNANIAAIKFITKETYEDAEKRIHKVMKANCA

SEQ ID NO: 101 - protein, 744 aa, Unknown
  found in bacteriophage isolated from environment
MIKTIKKSNGTVVSFDPERLNKWASWADKRGIIWSEVTMEAMKRVYGGCTTKEMHQAMIDVCVDKQTQEYSDMAGRLLLGIIYKEAFGGFTKVPTLVTFVKNMERAGLWEKMDYSQEELEYLQGYIVHSKDISYGYAVLKQFRDKYGIRDIKTGRLFESPQFMFMGMAMKAFEKQPKHRRLQDVIKLYTYLSDLKINAPTPYLNGLRATKSGYASCCLIKANDTAESLGIAAKVAYDMTTKQAGIGMLMETRTIGDGIRQNTIEHMGKLPYYKLVRSSVEANKQKSRGGSANNFYTALDPQIEDLLRLKHPTTVPSKRINEMDYSFGTNDYFWQCVQYDTDWLLFSYKDAPKLYDMFYTASADEFAMAVGHAVHSGVKHRRVKAREIAKLFIQQRYATGRVYPFFTNNANTHTPFKEPLKMSNLCMEIVLPVYGFEKETDLYRDDAVKEDGEVALCFLASLVAGRISEDEYADVAYYALAMVDSVIDLMDYPYPSMRNHVQKRRSVGIGLTNVAHYLAKNYVNYSSRAGKTKLHELAEMHSYYLHEASLRLAKERGVPEYMKFTKYPEGWVPPKTANKKIDEKHDAKLRYDWDDLAQRIKENGGIRNSVLEAYMPNESSSLATNTTNGLYPIRDFILTKKSATGNVLFIVPDYEELKYVYEIAWGIDTFDLIDCYAIVQKFTGQAISSDFYVDYAKAKKVSLAQALKYMIYANSVGMKTMYYLNSRIGVGKSALQDAYCEGCGV

SEQ ID NO: 102 - protein, 377 aa, Unknown
  found in bacteriophage isolated from environment
LGSFRQKTSLRNDKERRNHAMINQHPIFLGGERKTFDSLNKHYPKIFELYKQQKAQDWSEDEFPFEQSRLDFESVPASMSGVMLEILKWQWEADTQVAKSLAFAFAPFISDDIYATAIMKQSEIENLHALTYSEIVRQCIKNPETILDEINQNVAVQDRLKTVNRVLEELLDEGINYRLSYVRDSLLDKDPLHFHKVILKGLFAVTALEGISFMASFACTFALDAQDKFQGIAQAVQKIMLDEILHTKIDIEVLKETLRDDEWQKAFQQILPEIKVILDEVVESEEKWSYYIFSEGRAVVGLNTKLLHEWVYYNAAPLYDMFGIPRDFVAPKEPPLKYMIKKMEIDKEQNANQEQQNGAYLLNTVVDDLNSGFLEVP

SEQ ID NO: 103 - protein, 80 aa, Unknown
  found in bacteriophage isolated from environment
MTYVIYSKTGCPQCETAKNFAKARGIDHVVRMLGQDYELSDLMEIAQMPVRQMPFIMKTDGQNLKPVGTLQNFMAEVNNA

SEQ ID NO: 104 - protein, 730 aa, Unknown
  found in bacteriophage isolated from environment
NERVSSETFLACKGAIMNKVQIIKKNGSLEEPDIKKVLAAVTKSANRVGYKELPPDVTQALESAFMRILVKSTKQNNLLISVNDIHSIVEGALAEVNHEIYESYSTYRNYRKEVAQNWDELYQKTKDTLFLGDRENANFDSSLISTKGSIIRGYLTKEIFKQYHLTPEELEAIEKGFIYIHDLRDLIFGGINCCLFDIGKVLKGGFEMSGIEYCEPKSVLSALQVIGDVVLSATAQQFGGFTLAEIDKVLVPYAKKSLRYHAEKAASYGIPKEHYHNYVMEQLQIELTQGFQSLEMKLNTVPCSRGDFAFTTLTFGLLDSDMSNEDNRLQYMIASTILDVRMNGQGKSKKPVVFPKLVYIYDQKRHNENICQGHLYSKAIECCSKAMYPDFLSVSGHGAVAEAFERSGKVISPMGCRAFLSPYLNEDGEEFYVGRANIGAVSLNLPMIYQYSKENGLDFWKELDKYLEMIRSFHKKRYEMIANMPASSNPLAFTQGGLYKGTKKPTDRVGWDIVKSFTASFGVTALDELSVLAEGKRLHEVGSCSFAYDVLEYINMKTEEFKNEDGFLYAVYGTPAESLCGTQLKQFREMFGVSKGVSDKEYFTNSFHMNVAADITPFEKQDLEEPFFHICRGGRIQYVRVANPENLSALKSCITRGMLKGFYQGLNFDLAICEHCGNRPKADVEECEVCHSHDISVINRVCGYLGWTKIKGESRMNDAKIAEIRDRISM

SEQ ID NO: 105 - protein, 714 aa, Unknown
  found in bacteriophage isolated from environment
MNKVQIIKKNGSLEEPDIKKVLAAVTKSANRVGYKELPPDVTQALESAFMRILVKSTKQNNLLISVNDIHSIVEGALAEVNHEIYESYSTYRNYRKEVAQNWDELYQKTKDTLFLGDRENANFDSSLISTKGSIIRGYLTKEIFKQYHLTPEELEAIEKGFIYIHDLRDLIFGGINCCLFDIGKVLKGGFEMSGIEYCEPKSVLSALQVIGDVVLSATAQQFGGFTLAEIDKVLVPYAKKSLRYHAEKAASYGIPKEHYHNYVMEQLQIELTQGFQSLEMKLNTVPCSRGDFAFTTLTFGLLDSDMSNEDNRLQYMIASTILDVRMNGQGKSKKPVVFPKLVYIYDQKRHNENICQGHLYSKAIECCSKAMYPDFLSVSGHGAVAEAFERSGKVISPMGCRAFLSPYLNEDGEEFYVGRANIGAVSLNLPMIYQYSKENGLDFWKELDKYLEMIRSFHKKRYEMIANMPASSNPLAFTQGGLYKGTKKPTDRVGWDIVKSFTASFGVTALDELSVLAEGKRLHEVGSCSFAYDVLEYINMKTEEFKNEDGFLYAVYGTPAESLCGTQLKQFREMFGVSKGVSDKEYFTNSFHMNVAADITPFEKQDLEEPFFHICRGGRIQYVRVANPENLSALKSCITRGMLKGFYQGLNFDLAICEHCGNRPKADVEECEVCHSHDISVINRVCGYLGWTKIKGESRMNDAKIAEIRDRISM

SEQ ID NO: 106 - protein, 43 aa, Unknown
  found in bacteriophage isolated from environment
MVWGFSDPQWSFSYHGQMDLWSCFKPFLGLAIAFSALPTKVKL

SEQ ID NO: 107 - protein, 131 aa, Unknown
  found in bacteriophage isolated from environment
MIKLSQKQLEWIKDYASECGSCEKNHVRYSTFHTVFTLYVGDNVLSDSVVDGVPLPNELLDKLAVVTGTWSEEDGHDLSNDVVFYSLENIMNPEYIMLMTCAQDCVPLQNFIKEHCEEFITKQVPCQVVFE

SEQ ID NO: 108 - protein, 161 aa, Unknown
  found in bacteriophage isolated from environment
MNYMEIRPFDTANGEGVRVSLFVAGCKHHCEGCFNRESWKFNAGKEFTYANLYGIIKLMDDKAISGLSILGGEPLDDRNIQEVTNICKRIKTVYPEKSIWLWTGFQLHEKIHLDVMKYVDVVIDGKYDSSKPTVKPYRGSDNQNLWRKEYGWQGDCQWRAE

SEQ ID NO: 109 - protein, 38 aa, Unknown
  found in bacteriophage isolated from environment
MCYRTNLTVGVTEEELKAFCEKIERDTKWESGTVLNQK

SEQ ID NO: 110 - protein, 106 aa, Unknown
  found in bacteriophage isolated from environment
MSKVYNTRKLQIFVLCQFMAKEYNCYYCGTGFISDNDGSYLPFKEAVKLFNEEVSSKKDIEKVKLTYSKKDKKIICLDNFVKVTGEAKEFMDESEISFTSILKVAQ

SEQ ID NO: 111 - protein, 92 aa, Unknown
  found in bacteriophage isolated from environment
MARTDWEVKELVSDAGNGCEVYMIRGHVPDPLAIEMIDHHTSGFYKELGEPSVERTWTKPVPDSTGNCSVIYHIVNPQKCKTAMAVTFVTFD

SEQ ID NO: 112 - protein, 298 aa, Unknown
  found in bacteriophage isolated from environment
LREKIMKTIIEAVVTAQEKFFHTEKFNIIQFPSGEIGGNFSEDFVKFTERNAGKIDNVILTVQGYDKDTLFALALAKDAVDSLVPYKSAMKTVVFGFLPNARYDRHMFKGDSAALKAFANLVNAMGFDAVCALDPHSNVAENLFKCFQSMKQKDVAAHFASDPRIDFLVAPDAGAAKKTEETAKEVDKPYITMSKVRNLKTGEITGMRILDTVDLTDKTVMILDDICDGGRTFIEAAKHLREAGAKRVELYVTHGIFSKGVENLLDNGVDHIYTTNSLGEAKDRGLTHYTQVTVVTID

SEQ ID NO: 113 - protein, 128 aa, Unknown
  found in bacteriophage isolated from environment
PQSMRLKQNLSFIIFVIISATTVACSFNKWVSFNLIMWNGDPSIPPFKESSKTLNVSRLAPLISLTINVTCPYSLSVSNANAKALSATSLRTGYLDAIFVTTKPNKGFARYSRWINLPSEAASFAKAL

SEQ ID NO: 114 - protein, 556 aa, Unknown
  found in bacteriophage isolated from environment
LNHFMQYQQVTQMLTNLVTFTSTLVQQNTCSIHHVVISGSTAPQLMVSLLVFNVLLKITTTGTPPSSNVTKKKQLTKSKLTVFWVKMLLVENIGKHSTTVIYQLKSTLKKAQLFLCVYQLSSRTLFQVSIGRDIWKMLSLLRFGRLVPLQLLHCTTNVSVRSGLTLLVTTTYICLISAMTLLCVVCPALLMTHLTLVTQALKGLIASLRYIQLNASMDSPIQSLILVALYQPLNTLCVQTLLGKVVMSLKKKDASKVSYKPSVASQKLTQLVLQVLFQTLIISGELYQYYQNSVKRLWNVMANWFVLTLETLYILSQDIKQFTSVLKRLITNTASRMPVTQCAPSTSLKILTMLWLGGYVQKAMKWWLTEKTLKPIQCCKMLTSTALQTLHVLRRLMELLRHCTTSLGELLTLKGLRYWMSTSALSMVTLSRWNVQTKSSVCMKWVLQALTCLVALTLTSTLVIPLHLLSKQLLQALVVKRLCLQKTLKQIVVLRNLLLVVHPCGMAKSKLMAMGSRALQMYLTTQLVLYVSLVTLSSSATQLLVIFEVILTSSFK

SEQ ID NO: 115 - protein, 169 aa, Unknown
  found in bacteriophage isolated from environment
TCFAIFHHNVSFVKFYGICHQQFISVDVARCVNYCTRYRLNISSNLCQVVDKPSSNVRFPKLYQILVDAKDITVRDRQFTCVFDQLTQIFHTKCARVYHKTYARVSVLVHSTIGKCKSDFCSKCANTTFLNHKCFVRFCITTNLFRSKTTYCGHPIAFLQFSYIAIPEL

SEQ ID NO: 116 - protein, 792 aa, Unknown
  found in bacteriophage isolated from environment
EESIMRMVNDHAEVIKSSTSLETSQAQITMTPEMFSLLSSGVYTFKERAVIRELSCNAVDAQKEAGRENIPFHVHLPTRFEPYFEVRDFGTGLTHDKVMSLYLNYGASTKNDSNDYIGAMGIGSKSPFAIAQSFTVSSYVDGVVNKYSVYLENGIPQVTKLTTNPTKEPNGLAVRVAVADHRISKFFEEAGNVYSYFAVKPESNIVYDDVLADMNVIAREEGVYDAMIHKQSWRSSGNRTEFNVVMGNIAYPVNMEALLGDDFFKVLPEFFRRSVDLVNIYMPIGSVAIAASREALQMNDTTKNVIIEATKKITEAITKDVIKKVNSQPTLMDAAQAYAELRLNSREMFNAVCPKLEWGGVKLDSLEEELLNIRRGIIYAEDGSVIYERDGKGNIKVDSKGNNIPKVDYLYNPVAYVKFNSLESKIRATALSYTQEASMFNIFGAMRKSQIEQFLFVINDRRNKNGTEKTVGRNQILRGACRDYASESNLFHRYNGIVFVFSTEKELDDLINLHKLDKSLLKIVKMSDKEHHYQRKEAVRGVVKLWKAVPAETKASYKEVSEDLDTIEEPQLYIKAVGDTVDGRCFCSSPEDVAKSVANVTGKTVYVFRKANWKKIPEDWIEVDEKLLNDSLTDVHWINHNRYMTRIYMDGVLDLTSSWIIARNFTFNNRKISRGYCYSRDTIKTIFLEGNEDAVEAMFGKIQYVAAPFAYTYTISVLQDLKSCLDNDTKLYKKIKKAGDRMVIKLTNYLSKRKQENFLLSHLDWNKVSPIEVSKFLGFNVKCVPEGTTIYD

SEQ ID NO: 117 - protein, 788 aa, Unknown
  found in bacteriophage isolated from environment
MRMVNDHAEVIKSSTSLETSQAQITMTPEMFSLLSSGVYTFKERAVIRELSCNAVDAQKEAGRENIPFHVHLPTRFEPYFEVRDFGTGLTHDKVMSLYLNYGASTKNDSNDYIGAMGIGSKSPFAIAQSFTVSSYVDGVVNKYSVYLENGIPQVTKLTTNPTKEPNGLAVRVAVADHRISKFFEEAGNVYSYFAVKPESNIVYDDVLADMNVIAREEGVYDAMIHKQSWRSSGNRTEFNVVMGNIAYPVNMEALLGDDFFKVLPEFFRRSVDLVNIYMPIGSVAIAASREALQMNDTTKNVIIEATKKITEAITKDVIKKVNSQPTLMDAAQAYAELRLNSREMFNAVCPKLEWGGVKLDSLEEELLNIRRGIIYAEDGSVIYERDGKGNIKVDSKGNNIPKVDYLYNPVAYVKFNSLESKIRATALSYTQEASMFNIFGAMRKSQIEQFLFVINDRRNKNGTEKTVGRNQILRGACRDYASESNLFHRYNGIVFVFSTEKELDDLINLHKLDKSLLKIVKMSDKEHHYQRKEAVRGVVKLWKAVPAETKASYKEVSEDLDTIEEPQLYIKAVGDTVDGRCFCSSPEDVAKSVANVTGKTVYVFRKANWKKIPEDWIEVDEKLLNDSLTDVHWINHNRYMTRIYMDGVLDLTSSWIIARNFTFNNRKISRGYCYSRDTIKTIFLEGNEDAVEAMFGKIQYVAAPFAYTYTISVLQDLKSCLDNDTKLYKKIKKAGDRMVIKLTNYLSKRKQENFLLSHLDWNKVSPIEVSKFLGFNVKCVPEGTTIYD

SEQ ID NO: 118 - protein, 788 aa, Unknown; identical to SEQ ID NO: 117
  found in bacteriophage isolated from environment

SEQ ID NO: 119 - protein, 376 aa, Unknown
  found in bacteriophage isolated from environment
LTRESNKMTTKTKAQIDAEIYKLVKEGKLTKTAIAQKFNTSTRSVGRAVERHEATLKGKKKATSTPATKTLKQVAKTFKKKAGKPVEKVVKDTVQKAPVNKLHEAMQKDDKIEYMITGDSVIMTYGSESEIVESTHPNYQEIVVHVVKGEFKKAFELMNIRKSIENFTQGAITIKGDKLFYGAVEMRSTLVDRILHMMKTGDKGFERLVMFFEKLMENPSKDSVEQLWGFVSHLDVEIDEEGYIIGWKKVSTREGKLVDSHTYKVPNDLGNIVEMPRWMVDNNRNVTCSQGLHVGAWDYVRCFSGDTILKVRVHPRDVVSVPTDYNDMKMRSSRYEVAAIVDNQRKVLEAWDGKTEALHVIVGTAGELISQRKREI

SEQ ID NO: 120 - protein, 369 aa, Unknown
  found in bacteriophage isolated from environment
MTTKTKAQIDAEIYKLVKEGKLTKTAIAQKFNTSTRSVGRAVERHEATLKGKKKATSTPATKTLKQVAKTFKKKAGKPVEKVVKDTVQKAPVNKLHEAMQKDDKIEYMITGDSVIMTYGSESEIVESTHPNYQEIVVHVVKGEFKKAFELMNIRKSIENFTQGAITIKGDKLFYGAVEMRSTLVDRILHMMKTGDKGFERLVMFFEKLMENPSKDSVEQLWGFVSHLDVEIDEEGYIIGWKKVSTREGKLVDSHTYKVPNDLGNIVEMPRWMVDNNRNVTCSQGLHVGAWDYVRCFSGDTILKVRVHPRDVVSVPTDYNDMKMRSSRYEVAAIVDNQRKVLEAWDGKTEALHVIVGTAGELISQRKREI

SEQ ID NO: 121 - protein, 113 aa, Unknown
  found in bacteriophage isolated from environment
EVTSNLHTRSQNVTNKVHHFSAIFTKFSKYHEEFFQHFVWRFIRYFLKPSKYRVKINFNIFFAVDNTPLFDRSTFALQNVRVGVFHRIIQTVNYFHWTPHNIIVTVYSARLTK

SEQ ID NO: 122 - protein, 65 aa, Unknown
  found in bacteriophage isolated from environment
VNSTFKNSQVSESDKYTQEESRYIIKGNTGSDVAAALEFYRDGFYQCTIKANNLIDMILLGNKQQ

SEQ ID NO: 123 - protein, 108 aa, Unknown
  found in bacteriophage isolated from environment
MQINGRDFVAVYYEKGKEVGVAQVSYGNGKWLYGTIAVVGTRSDTKTFKDCVDLLEESIQNHWCLIWMTDNEVIERFKKIDINIDSIEHVDLYELTEKVNYESNSSQR

SEQ ID NO: 124 - protein, 261 aa, Unknown
  found in bacteriophage isolated from environment
MGIVKIIKGDIFDAFDKGKFDIIGHGCNCMNFMGAGIAATISKRYPKVYDTDTEVYLFAGGIRHKPCENLLGNFSVARLKQGRIANLYTQLHTGKDARYSALESSLKQLNRYCEVNQLKKVGLPMIGAGIGGLDPQAVTVIINQVMKSVDVYLYVYEAKMYNELHSGWKNYCEPEYFAGVVVFTDNEVTLFRRRKGKIHQSNPPVEKMSLSNALVTHLSKSNHRIAVTFGSDADTYIYARTDEDIETVFSSPEVTFLDAKN

SEQ ID NO: 125 - DNA, 876 bp, Salmonella enterica
atgtcgcgactggcgcaggatatgaaaaaactggcgcaccgcgcaggtggcagccacaaaaccgtccacgaccgcgaacagatggcgcagcgttttgcccgtcatttgctggcgcagaatattcaggtcaccagcacctgccagctcaaagccagacacatcgcgggatatattcatgaatggctggcgcagggtatttctctgcgaacgctacagaatgagatggcaatggtgcgctctattctggctgaagccggacgcacacaactcagccagtcagaattaatcagcaaccagtcgctcggtatcagtggtgccagctgtgacgggacgcaccgggccattccggatgcactttaccatcaggtactggaccgggttcatcatatcgacgcaggcctcgcagccagcctgcaactggcgcgggtgatggggctgcgcggtcaggaagcagtacagtgctgccagtcgctgaaaacctgggataaacagctggaaaaaggggctgaacgtctgccggtgatcttcggcaccaaaggcgggcgaccacgcatgacacaggtgacggaccgggaagcggttcgtcaggcagtgaaagaggcgcttgggattgccggggagcgtaacgggcatctcattgacaagccggatctgaaatctgcaatggactactggcacaaccatctccgcgataccgggctgacgggggaatactctccccactccctgcgctatgcctgggcgcaggatgcgatccgctattacgaagagcagggtctgagccataaagaggcgctggcggtaacttcaacggatctgggccatggtgatgggcggggaatatatattgagcaggtatacgggtatactgattga

SEQ ID NO: 126 - DNA, 876 bp, Klebsiella pneumoniae
atgtcacgtctggcgcaggatatgaaaaaactggcgcaccgtgcgggtggtagccataaaacggtccatgatcgcgaacagatggcgcagcgtttcacacatcatttgctggcgcagaatatccagataacccgaaccgaccatattaaggccaggcacatcacaggctatatcaatgaaagactggcgcagggcatttccccgcgtaccttacagaatgagatggcgatggtgcgctctattctgactgaagccgggcgtacacaactcagccagtcagaattaatcagcaaccaatcgctcggtatcaacggtgcctgccgcgatggaacacatcgagcaattccggatgcgttttaccagcaggtgctggagcggatacagcaaaccgacgctggtctcgcggccagcctgcaactggcaagggtgatgggcctgcgtggtcaggaggcggtacagtgctgccagtcactgaaaacctgggataaacagctggaaaaaggggctgaacgtctgcccgtgattttcggcaccaagggcggacgaccacgcatgacgcaggtgacggaccgggaagcggttcgtcaggcggtgaaagaggcactgaatattgccggggagcgtaacggacatctgattgacaagccggatctgaaatccgcgatggattactggcacaaccacctccgcgatgctggactgacgggcgaatactcgccccactccctgcgctatgcctgggcacaggatgcgatccggtattacgaggagcaggggctgagtcacaaagaggcgctggcggtaacctcaacggatctggggcacggtgacgggcgcgggcggtatatcgagcagatttacgggcagactggctga

SEQ ID NO: 127 - DNA, 366 bp, Bacillus cereus
atggaggaaagagatatgaataaatcaacagttcaaatagctttaagtattacaaaattttcagcacagaagggatggaatgatgaagaattttgggaagcaatcgaattacttcgattaaataaggaagatacaagacaaacaatgatagaaaaattagatgggattccagttacttacgataatacaaatgattatccgattatgttgaaagtagatcatgtggcagaagtattagggatttcgtcaagaaaagcatatgacattatggatcaaaaaggattcccattagtaaaaatcgggcgtaggaaagtggtaccaagggatgcattctttaattggctcgaaaaggaggtgtcagcatag

SEQ ID NO: 128 - DNA, 759 bp, Enterobacter cloacae
atgccgattattcagtctgttgaacgtgcgttgcagatcctcgacctgttcaacgagcaggccaccgagcttaagatcaccgacatcagcaaactgatggggctaagcaagagtaccctccactcgttgctgaaaaccctgcagcttcatggctatatcgatcagaacccggagaacggcaagtatcgcctcggcatgaagctggtcgagcgcggtcatttcgttgtgggctccatcgatattcggcagaaggcgaaaggctggctgacggagctgtcacagcggaccgggcagacgacccatctggggatcctggacgggcgtgaaggggtttatatcgagaagattgaaggcaagctggccgccatcgcctattcgcgcattggccgccgtctgccggttcacgccaccgccatcggcaaggtgttgattgcctggctgggcgaaaccgagctgaacgccctgcttgagggttatcaatacactacctacaccccttccaccctcgcctctcgcgaagccttaatggccgccctggcgcagacccgcgagcagggctatgccctggatagcgaagagaacgagcagggcgtgcgctgcgtggcggtgccggtgtggaaccacgagtcccgcgtcattgccgccctgagcctgtcgacgctgacctcccgcgtggacgacgaagagctggctaatttccgcgagcagcttcagcaggccgggctccagctctcacgcgcgctgggctacccggcctga

SEQ ID NO: 129 - DNA, 246 bp, Vibrio parahaemolyticus
atgcctgtgtgtgctctacctaacgcggacggttttctcgctgtcgttcctgacattgaagcggcttcatgccgtggttatgtcatggtgacggctcaagaatatgacacgttaatgagctacacacagctgactccaggagagatatctcaagcgttcggcttgggtttcaccttggtgttcgttggcggatatctctcaacttacgccatcaagatggcaatacgtttaataaaactactttga

SEQ ID NO: 130 - DNA, 348 bp, Bacillus thuringiensis
atgaaaaattctacagttcaaatcgcgctggcaattacaaagttttcagctcaaaagggatggaaggatgaagagttttgggaggctattgagttacttcaattcaataaagaagatgaaaggcaaacaactgtagaaaagctagatagcattccagttactaatgatagtacagattatccaattatgttaaacgtaacacacttagaagaaatattaggagtagcgaaaaggacagcttacgaaattatggatcaaaaaggattcccgttagtgaaaatcgggcgtaagaaggcggttccaagggatgcattctttaattggttagaaaagggggtgtcagcatga

SEQ ID NO: 131 - DNA, 741 bp, Enterococcus faecium
atggtaaaaaaaataaaagccgaagatctatcagttgaaaaaggaacttacatgatttacgcaaatcctggtatgggaaaaacttattctttaggatttcttccaggtaaatcattggtattagatgttgacggatcatcatcgacattggcaaagcatcctaacaaagaaaatattgaagtgtgggaattagattcttctgatatttggcaagaatggcttgatactatttcagacttagtcgcaaataaatcttcctacgaaaagcaattcgacaatatttgtgtagataacatttctgaattgttcaaagcgcaattggaagatttaggcaagaaaggaaaaaatagtggtgttccttctcaagccgactatcaaagaacagattttatgaatttgcgaggtcttagagcattgaataatttagattgccgaatagtcctgactgcatgggaaacaacagacacatatacagaacctaatggacaattttttacaagatcaatgccagatataagatcaaaaattttaaataattttttaggcttatgtgatgtagttggcagacttgtaataaaaaaagatgacgatggtaatgaaacaagaggcttaatactaaagcctactagtaacgtttatgcaaaaaacagattagatgaacgtagtgggtgtttggtggaacaattggttgttagagcaggcggtgaaccgaatgtatcaactccgaccgtatcagattaa

SEQ ID NO: 132 - DNA, 261 bp, Escherichia coli O157
atgcgtaatatttctgtgtctgcgccagctcctgctgcgccattatttcctgtatcgaaccatcatgagcgatttttacgcctgcctgaggtgatgcacttatgcgggttgtcccgttcgaccgtttacgacctgatcagccgcgatgcgtttccgaagcagatcccgcttggcggtaaaaatgtcgcctgggcacagtctgaggtcagcgcatggatggcggaccgcatcagcgcccgtgggcggggatgtgatgcatga

SEQ ID NO: 133 - DNA, 894 bp, Escherichia coli str. K-12 substr. MC4100
atgaagctcttagcaaaagcacctctaaatctgttacgcgcctttgaagcggctggtcgtaccggagcttttgcgttggccgcctctgagttggaactgtcacccagtgcgatcagccatgccatccgcaaactggaaaacttgcttgatgtacgcctttttcagcgcagtacgcgagaaattacgctgacgaaagaaggtgaaatactgcttgagcacatacagcggggatttaacgaattacagcaggggttggcattagtgacggctgatgaatccaggcctttgcgccttcatactgcaccgagttttgcccatcaatggcttttaccacgtcttggtaagttcatacgtgagaacccaagcatcgatctgcgactttcagccagcacagaatatgcacgttttgaacaggatgattttgatctcgatatagtctacggtgaaccccgcccatcaccctatgagaagatcccgcttgctgttgaagaacttacgccactgtgttctccccaactggctgagcggctaaagaaaccagaggatctctatgcgttgacattgattcagtgcgatgtgcagttgtaccagtggaaaggatggtttgaggcgaataagatgacgccacccaataattatggccttcgatttgaccgtagctttatggcgattgctgccgcagttgacggcttgggagttgtgcttgaatcaaaactactggctgaacgtgaaatcgctagcggtaaactggtatgcccacttgtaaacagtaccagcgaaatacattacatcggtcattatttggttttcccccagcaccaacacatgcattctgcgcttgatgtgttcaaaacctggctactgaatgaactcaatctgggtaaaattcgttga

SEQ ID NO: 134 - DNA, 477 bp, Burkholderia pseudomallei
atgccgaagctccatgaagcggtcgccaacgggctgtccgaacgacttagaacgattcgaaaacgtgccggcctctcgcaagacgaactcgctgcgagggcgtcgctggctcgcacgaacctcgcgagcgtcgaacaaggacggcgggcaaacctccgactctcgaccctttcccgtctagctgatgtactgggcgtggatgtgctcgacttcttctgtgaccggcctgtcggcgaacaggaaccagccggggaagacgccccggctcgggtaatagcgaatgtgaaacggctgcgcagtgaggcagggctcagtcaagaagcactctcggtcaaagcccatcgatttcggacgtacgtcggccggttggagaacgaagcggccagcccaatggtggtcgatttgcaggacctggctgacgcccttggcatctcgattccggcactcctcgagcctagccagcacaaagccaaataa

SEQ ID NO: 135 - DNA, 897 bp, Yersinia pestis
atgttcgtaatgagtcggttaagtcgtgagatgaaaatgctggcaaaacaagctggcggtagccataaaaccgttcatgatcgtattcggattatggacaggtttagccgccatctgctggcccttaatattcaggtgcgtgatgttaaacacctaaaagcaaagcatattgaaagttatattactgaccgtttttcacaggggatcgcgatccgttctcttcataacgaaatggcggcattgcgcaccgttttcagattcgctggtcgggataaaatcgtcttatcagaacgattaaccaacaaagcattggggttaggtggagccagccgcgccggtagcaaattcgctatccctgaggaggtgtatcaagccgctctgcgcaccgcccaacagcaagacaaaggactcgcctgcgcccttcagcttgcccgcctgctggggctgcgttcacaagaggcggtgcaatgcgccaactcgttgaaaacatggcaaaaggagcttgagcagaaccggtctaaactaaccgtggtgtttggcaccaagggaggccgctcacgcgaaacccgcattctggatcctgaagcagtcaaacgggcagtcaaagaagcgcaacagatcgccgaaacacgcggcggcaaacttattgataaacctgacctgaaaaccgcgatgaatttctggcgctcccataccacccgcttagggctgaccggacattactccccccacagcctgcgctatgcctgggcgcaagacgctattaattattacctcgccgcaggatttagccgcattgaagccagagcgttaacgtcaatggatctgggtcatggtgatggccgtggccgctatgttgaacgcgtttatacccgcaaggaggcgaactatgtctga

SEQ ID NO: 136 - DNA, 321 bp, Yersinia pestis
atgattatggccaaagcccgtttacatgatgacgctatggttcagcttcttatggaagaccctgaatttgcgcaagtatatctgcatcaggctcttctagatattgatgaggaaggagggcaagaagcctttctgatggccctacgtcatgtagttgaggcccgaggagggatggcaagtgtggctaaaaaagcgggtgtatcgagagaaacactgtaccggacgttatcaccttcaggtaatccaacactaaaaacactgcttagtgtggtatctgcaacgggatttcagttttcacatcttgcatcgattaccgcatga

SEQ ID NO: 137 - DNA, 417 bp, Erwinia carotovora
atgtcccttggcgaaagattaagagaagagcgtgaacgactaggattcagccaagctgattttgctgagttagttggtgcatcaaggaaatcgcaaataaggtgggaaaaagctgaatcagctcctagcgctgattcaataagtctgtgggccaatgttggcttagacgtgttgtatctgatcactgggcaagctcagaaatcgtcatcaaagacacaaaaaagtagtgaaatagatgaaattctactgggtaagattgttcataaactggacttattagcgaaacatgccaatcgcagatggacacctagcgaactcgttttacagtcatcgaaaatatataactttttaatcaacgagtcggtagttgatgacgataggatcgataacgtgcttaaactggttgttaataattaa

SEQ ID NO: 138 - DNA, 492 bp, Bacteriophage
atgcgattcagtgacaacggtctaagatttacggcagcatgggaggctttcagcccggtgccgtatttcgcgaccaagaaagagcaggcccgcggcctgtacacttggggttatggtcataccggcactaatccgcctcgaagcattacccgcgcggaagcgctggagctactcaagcgcgatgtggcgtatgccgagaactgggtgaacaaatacgcacatccgagcattaatcaggcgcaattcgacgcgctggtggacctggtaatcaatgctggtccaggtccgatcgtaccggaccatgtcgcgaacgatttcgatgatgcggtgcgactgggtgactgggcgaaggtccgggctatactgccgcagttccgcaagcaaggcgggtcggtgctcttaggtctggtacgtcgcgcaatcggcagacaggcgctattcgatggtaagcagtgggacgttgccgagaaaatcgggcgtaacgcagcataa

SEQ ID NO: 139 - DNA, 414 bp, Bacteriophage
atgagttttaaatttggtaaaaatagcgaaaaacaattagctaccgttaagccagagctacaaaaagtagctcgtagagctttagaattatctccatatgattttacgatcgtacagggtattcgtacagtagcacaaagtgcccagaatattgctaatggtacttcatttttaaaggatcctagtaaaagtaagcatattactggggatgctcttgattttgctccatacattaatggcaaaattgattggaatgacttagaagcattttgggcagttaaaaaggcttttgaacaagctggtaaagaactaggcattaagcttcgttttggtgctgattggaatgcttcgggagactatcacgatgaaataaaacgtggtacctatgatggcggtcatgtcgaactagtttaa

SEQ ID NO: 140 - DNA, 489 bp, Bacteriophage
atgaatatatttgaaatgcttcgtaatgacgaaggtcttagactgactttatacaaagacactgaaggcttttggacgattggcataggccatttagtaacaaagaacccgtctttagccgtagctaaagctgaacttgacagaatgatcggtcgtaaatgcaacggtacaattacccttgatgaggctgaaaagctatttaatgaagacgttgataaagccgtccgcggaatcttgggtaatgctaaacttaaaccggtatatgattctttagatgcagttcgtcggtgtgcattggtcaatatggtcttccaaatgggtgtagcaggcgtcgctggttttactaattctcttcgtatgcttaaacagaaacgttgggatgaagcggcagtaaatctagctcaatctaaatggtatcgtcagacacctaatcgcgcgaaacgcgtaatctcaacatttaaaacaggaacttggaaagcgtatatatga

SEQ ID NO: 141 - DNA, 465 bp, Bacteriophage
atgcaactctcaagaaaaggtttagaagctattaagttctttgaaggtcttaagctagaggcttacgaagattctgctggaatccctacaattggatatgggactatccgtattgctggtaagcctgttaagatgggaatgaaaatcaccgctgaacaagctgaacagtatcttctcgcggatgttgaaaagttcgttgcagcagtgaacaaagctatcaaggttccaacttctcagaatgagttcgatgcacttgtaagtgaaacatacaacatcggtatcacagctatgcaggactcaacatttatcaagcgccacaacgatggtaataaggtaggttgtgcagaagctatgcagtggtggaacaaagttacagtcaaaggtaagaaggtcacttcaaacggcctgaaaaacagacgtaggatggaagctgacatttatcttgacagtgtatatccaaagtaa

SEQ ID NO: 142 - DNA, 486 bp, Bacteriophage
atgcgattcagtgacaacggtctaagatttacggcagcatgggagcaattcagcccagtgccgtatttcgcgactaagaaagagcaggcccgcggcctgtacacctggggttatggtcataccggcaccaacccgcctcgaagcattacccgagcggaagcgctggagctactgcgcaaggatattgccgtagcagagacgtttgtgcagcgcgcaatgccgatcggggcattcaaccaagcccagtacgatgcgctcgtagacctggtgttcaacgtaggtccgcgtgcaatcggcgcgaatactggaactggtcgcgccgttcgtgctggggatgttcagacgatccgtgttaaactgccacaattccgtatgcaagccggtgtagttgttaagggtctggtgcgtcgcgctaatggacgccttgcgctattcgacggaaagcagtgggacgttgccgagcgtatcggtcgtaattcagcgtaa

SEQ ID NO: 143 - DNA, 498 bp, Bacteriophage
atggacatttttggtatgcttcgtattgacgaaggctgtaaattagaattatacaaagacactgaaggtttttggactattggcataggacaattaattaccaaaaacccttcatacaatgtagcacgtgatgagcttgatcgattaatgggtcgggtttgtaatggtcgtatcactcaacaggaagcagaaaatcttttcaattcttctgtagaaaaagctcgtaaaggtatcttggctaatgctactctaaaacctgtttatgatgtgctagatgaagttcgtcgttgtgcgttaattaacatggtgttccagatgggtgttgccggtacagcaggtttccctaaaggtatgcgtctgttaaaagcgaaacagtgggacaaagccgcaatcgagttagctgattctcgctggtacaaatctcaaacccctaatcgcgccaaacgcgtgattgcaacttttaaaactggtacttggaaagcatatgaaaacctataa

SEQ ID NO: 144 - DNA, 885 bp, Staphylococcus aureus
acacgtttaacaacacaagaattattatatctaaatgaactaaaattagcaataccttgtaaataaaaaatgtttatatttttcactattatagagctatttatctaaaaaggttcaataagacttaaatacgaattcaggcaacttaattgtgttaaatacagttttgaatgcctaactgtatttcttttctctttaaaatacagttaagtacattataagatgttgtgcggataaacaaactaattgcatcaaatttattttaaaataacaacaacaaaacgttaagagaataacatttcggtgatttaaaagctacgcacgtttttgttatcttcaaatttaaattttaaggagtgttttcaatggaaggtttatttaacgcaattaaagataccgtaactgcagcaattaataatgatggcgcaaaattaggcacaagcattgtgagcatcgttgaaaatggcgtaggtttattaggtaaattattcggattctaatttcaatatgttatgtaagtaatcagtattatttcaaaggtgagggagagatttaaatgactggactagcagaagcaatcgcaaatactgtgcaagctgcacaacaacatgatagtgtgaaattaggcacaagtatcgtagacatcgttgctaacggtgtgggtttactaggtaaattatttggattctaatataataactaatattctttaaaataaactgggtgagcatactttaatgttatgcactcagtttattttatttgcagaaatttgagcctctgttaagatttagatacatagacaatataggagatggggaaattgggatataaaaatattttgatagactttgatgatacaattgttgatttttatgatgcaga

SEQ ID NO: 145 - DNA, 1395 bp, Bacterium
atgaccatcgacgttgccatcgcctttgccgacgctaaccactccacctacctcgaagacctgaaaggcctcgcgcgcataccgagcgtcagcttcccgggcttcgacgctgccgaagtggagcggtccgcggaacacgtcgcggacctgtgccggaatcgtggcctcgagaacgtcgaagtccttcgcgtccccggcgcccacccctacgtctacggcgactggctacatgcgccaggcaagccgacgctgcttctctacgcgcaccacgatgtgcagccgccgggccgcgaggagctgtggctcacgccgcccttcgagccgacggagcgcgatgggcgcctgtacggccgcggctgcgctgatgacaaagccggcgctatcacgcacatcgctgcgattgcagcgtggctgggcgcgaccggctcgctgccgctgaacgtgaagctgatcatcgaaggggaggaagagatcggctctgagcaccttgagtcgtttctggaaacccatgcttcgaagctgatggcggacgccatcgtgctcaccgacactgccaacttcgatgccgacacgccgtcgatcacagtggccctccgcggccttgtcgcagtcgacgtcacggtgcggtccatggaccatccattgcactccggcctgtggggcgggccgataccggacccggtgcaggccctcgcccgcatgattgccgcctgcactgacgcgacggggcggatgaccatccccggcatatacgacgacgtcgcggagcccggcgctgccgccgaggcaagcctcaaggtgctggagtaccctgaagcgctcttccgcgagcacaccggcctcaaccctgagtcgcagctactggtggcgtctacagacgtcctgcgctcgaactggtaccagccgtcgctctccgtgaacgccatccaggcttcgtcgcgcagggacgtcgcgaacatcatcaacgacagtgcctgggcgcacgtcggcatccgcatcgtgcccaacatggacgcgcgcaagaccctcgaggcgctgaaagcgcacctcgcagctaatgcgccgtggggcgtgcgcgtcgaattctccaacgaagccgccagccccgcctggaccacggataccgacgcaccggccttcgcagccgcccgccgcgccctcgaacgcggctacgccaagcccgccatcgacatgggctgcggcggctccataccctttgtcggccccttcgccgctgccctcaagggcgccccggccctgcttatcggcgtcgaagacccgctgtcaaacgcccacagcgagaacgagagcctgcatctcggcatgttccgcaaagcaattgcgtcggcggtagcgctgtacggagaaatcgcggcgctagacagcgtgaagtag

SEQ ID NO: 146 - DNA, 1029 bp, Bacterium
atggccgaccgcagcgacgtggcaccccgacctccgcgggcccggaccggcgacgccatccgcgtgcccgcggccgcgctcgccagcgcggtcgccgcgctgggccgccgggcggtcggccggaagcggcggcccgcctggagcgcgcggctggaagccaccatcgccgcctaccgcggatcgtggtcgaccatgcccgcgctcgggatcgtgcgctggcgcaacgtcggcgaagcgctgagccgcctccgcacggacggcctccgcccgcgcttcacccgcttcgagagcggccagtacggcatccagggcacctggctcgagccggccggcgccagtggggccgtgctgctctacttccacggcgggggcttctgcttcggctcgatccggacccacggtccgctcatcggcgcgctggcccgggcggcgcgggcgcgcacgttcgccgccgagtatcgcctcgcgcccgagcacacggcgcccgccgcccacgacgacgcgctgtcggcctaccggcacctgctcggtgaaggcatcgcgccgcggcagatcgtgctcgccggcgattcgtccgggggcacgctggtcctcagcacgctgctggcgctgcgcgacgccggggaggcgatgccagcggccggcatcgccatctcgccctgggtggacctgtcgtgctcgggcgcgagcttcaaggccaacgcccccttcgacttcgtcggcgagccgcactgtcggctggcggcggtcagctatctgggcgccgtcgatccgcggcggcccgacatctcgccgctgttcgccgacctgcgcggcctgccgccgctgctgatccaggccggcggcgccgaggtcctggtcgaccagatccgggcgttcgcgggtcgcgcccgcgacgccggcgtcgacgtcacgctctcggtctacgacgacatggtgcacgtgtggcacctgatgcgcgacgtcacgcgggacggccagcgggccatcgacgaggccgccgcgttcgcgcgcgcccacgcctcgtga

SEQ ID NO: 147 - DNA, 1086 bp, Bacterium
ttgctgttccgcctcctcgccgtcgccgacggacacaccccggccttgaccccgaaactcgtggaccccagggccgggccggtgaccttcaagctcgccgcgcatgacctcgacaagcgtgaccccgccctggtgctcaagggccgcgtcctcgacgaggacaggaagcccgtggccggcgccgtggtcgagccctgggggttccagaaagggcagcggggtcagggcggcgggctgaaggggttcgaccatctcgccgtcaccaacaacaagggggagttccggctgggcgtccccgagcccgggttagaggtatgggtccaggtcggggcgcggttcatggccgcccagaaagcatggctccttgccggccccaaggcgcatgacttgaccctcgtcaccggcgcctccgtcaccggccgcctgctgaaggacggcaagccgctcgccggcgtcgcggtcgggctggcgcagaagagccgcgaccccttcaccttcgtcggcgacttccaggcggccaccgatgagatgggtgtctttcgcatcccgcacgtcctgccgagagtcgagtacttcctctacggcaagatggacagcctgcgggcacacggggccatcgcggtgaaggaggtgcggaccggcgccagcggggcggaggtggatgtgggcgacctggccgtggcccctgggcacaagctgacgggccaggtggtcctggcggacgacaagccggtgcccgaaggggcgagggtgctcgtgtcgcgcgaggaggcgtgggacacgcagcaggcggtcgtcgacaaggatggacatttcgcgttggaggggctgccgccggagcggtattccctctcggtgcgggtgcccggctaccgcctctcgccgaagaacggcagctacgacctgctgggcggtttccgcctgctgggtgtggtccgctcggacatcaagtcgctgcgggtcctgctggagaagggggaggggccggaccgacttcccacatttgaccagaagcggcacaaggagtaccaacgcctccgggacgcgcccttgcgcggggccccggaagagggccgcgccaagtga

SEQ ID NO: 148 - DNA, 483 bp, Bacterium
atgaaaaaattaatggcaaccctgattctggcaggcttggcaacttccgtatctgcagccggtatccatattgaagacggttgggcacgtgccactgtcgaaggtatgaaaatgggtggcgcattcatgaaaatccaaaacgatgaagccaaacaagacttcttggtaggtggcagcagccctgttgcagaacgcgttgaagtacacacccatattaacgacaacggtgttatgcgtatgcgcgaagttaaaggcggcgtgcctttggctgcaaaaggcgtaaccgagctgaaaccaggcagctaccacgttatgttcatgggtttgaaaaaacaattgaaagaaggcgaaaaagtgcctgtaaccctgaaattcaaaaacgcgaaacctcaaactgtcgagctggaagtgaaaaccgcaccacaatccggtatggatcacggtcacgaccacggtgcacacggtggcgcacatcagcactaa

SEQ ID NO: 149 - DNA, 828 bp, Bombyx mori
acattctgtctcgagcagcgaaacctgtcacaattcaaaatgtattccaaggtgttgttatccgctgcactccttgtatgcgtgaacgctcaagtttctatgcctcctggttacgcagagaagtatccgatcaccagccaattttcaaggtcagtccgacaccctcgcgatattcacgactttgtcacttgggacagggaaatggggggagggaaggtcttcgggactttgggagagagcgaccaaggactttttggtaaaggtggttacaacagggagttcttcaatgatgaccgcggcaaactgaccggacaggcttacggcaccagagtattaggacctggaggcgacagtaccagttacggtggtcgtctagactgggccaatgagaacgccaaggctgctattgacttgaacaggcaaattggtggcagcgctgggatcgaagcatcagcttccggcgtgtgggatcttggtaagaatactcacttgtcagctggcggagtggtctctaaggagttcggtcacagaaggcctgatgtcggtttacaggcccagattactcacgagtggtaattgccaacagcattatcaaagcagctatataagtgccgcttagacaagcattcttgcctcgtaagcctagaagtatgaataaaattttgtctaaaaacattgttataaaaatcgattgatttgtaactatttatctgcgttctgtaatttcctctttaaatcaccaacattcatctaacattttttaaatatgaataaaaataaatttcttaatataaaaaaaaaaaaaaaaaaaaaaaaaaaaaaaaaaaa

SEQ ID NO: 150 - DNA, 805 bp, Bombyx mori
acattcggtcttgaggagcgaaacttgatacaactcaaaatgaatacaaatctgttttatatcttcgctacaactctggtgtgtgttaacgcagaagtttacggaccttctgattacgcggaagattactcgatcagcgggcaatcctcaaggcgacaccctcgtgacgtcacttgggacaaacaaatggggggaggcaaggtctttggcactttgggacaaaacgatgatggactctttggaaaagctggttacaacagagagatctttaatgacgaccgcggcaaactaaccggtcaggcttacggcaccagagttttaggacctggaggcgacagcaccaactacggcggacgcctagactgggcgaacaagaatgcacaagccactattgacctaaatagacaaatcggtggcagatctgggatgacagcatcaggctccggtgtgtgggatctggataagaacacccacttttctgccggtggtatggtctcgaaggagttcggtcacaaaagaccagacgtcggtcttcaagcagagatccgccatgattggtgatcacctcaacacttaaacaataatcttttgccaaataaattagttttttttaattattcaatataggttattattgattgttttatctaaaatcgaaatttacgaagtatgtctaactgtaagtttgtttcataatgtaattagacaaataggatctcgtgctttgttatgacggttagaagtacaatttaataaaaaaattacgtttcctaaaaaaaaaaaaaaaaaaaaaaaaaaaaaaaaa

SEQ ID NO: 151 - DNA, 879 bp, Bombyx mori
acattctgaattaactagccaaaccacaaacaactcaaaatgaattccaaattgctgtttttcatcgctacagtcctggtgtgtgtaaacgcagaagtatacaggtctcctgattacgaagaagaataccccatcagaggcctattttcaaagcgacacccccgtgacgtcacgtgggacacgaaaatgggaggagggaaggtcttcggcactttgggacagaacgacgatggactcttcggtaaagccggttacaacagagagattttcaatgatgaccgcggtcaactaaccggccaggcttacggcaccagggtcttaggacccggaggtgacagcactaactacggtggacgtctggactgggccaacaagaacgcacaagccgccattgacataaacagacaaatcggaggcagatctggaatgacagcctcgggctccggtgtgtgggatcttgataagaacacccacatctcagccggcggtatggtctcgaaggaatttggtcacagaagaccagacgtcggtcttcaagcagagatccggcatgagtggtgattgtcaacacaatcccatcattcatagaattatgtttgtctttcgccaaaaaaagctactattttttttctgtgtatattttgtaattactagtgtaaaatgttatttttgattgatttaagaaaatgtcaatattattaacgaaatatgtcttacatattatgtactgttaacttgttttcttaatgtaattatgcaaacagtattttgctttatctcatactttgtgataaattaattaaaccatctagataataaataataataataaaaaattaatagtttaaaaaaaaaaaaaaaaaaaaaaaaaaaaaaaaa

SEQ ID NO: 152 - DNA, 840 bp, Bombyx mori
acattctgtctcaagcagcgaaacctgacacaagtcaaaatgaattccaaactattatatttcttcgccacggtcctggtgtgtgtcaacgcagaagtttattgggaggacgaagaaggatatccagttagcggtcagttttcaaagcgacacccgcgtgacgtcacctgggacaaacaagtggggggagggaaggtcttcggcacgctgggccaaaatgatgatgggctttttggtaaagccggttacaacagagagatcttcaatgatgaccgcggcaaattgaccgggcaggcctacggcaccagggtcctgggacccgcaggggacagtacaaactacggtggacgtctagactgggccaataagaatgcggaagctgctattgatataaatagacagatcggaggcagatctggaatgacagcaacaggctcaggagtgtgggatcttgacaagaacacccgcctctcagccggcggtatggtctcgaaggaattcggtcacagaagaccagacgtcggcgtccaggcagagttccgtcatgattggtgatcaagaagatcccatcaagacatcatagatctaaacaataatcttttgccaaagaaatcgatactttcactctgcatttttttaaattactaagaactgaatcaaattttagaattattataattaaagttatatattttagtgataaattatttggataatgtaagtaaatagatatagttacagtattctactttacttgtacttttaataaaacaaattgaattcaatggaaaaaaaaaaaaaaaaaaaaaaaaaaaaaaaaaaaaaaaaaaaaaaaaaaaa

SEQ ID NO: 153 - DNA, 30 bp, Artificial Sequence
  Multiple cloning site
gccggcagtggatccccggggaagatattc

SEQ ID NO: 154 - DNA, 15 bp, Artificial Sequence
  Primer
gctacactgctgaga

SEQ ID NO: 155 - DNA, 15 bp, Artificial Sequence
  Primer
tctcagcagtgtagc

SEQ ID NO: 156 - DNA, 13 bp, Artificial Sequence
  Primer
catcagatgctgg

SEQ ID NO: 157 - DNA, 13 bp, Artificial Sequence
  Primer
ccagcatctgatg

SEQ ID NO: 158 - DNA, 35 bp, Artificial Sequence
  Primer
taatactctacagacaccactaactgatgctgctg

SEQ ID NO: 159 - DNA, 54 bp, Artificial Sequence
  Primer
ctcgtttcaacatcttttattttgtacatacaagggattaagcagttcttaccc

SEQ ID NO: 160 - DNA, 54 bp, Artificial Sequence; identical to SEQ ID NO: 159
  Primer

SEQ ID NO: 161 - DNA, 29 bp, Artificial Sequence
  Primer
atgtacaaaataaaagatgttgaaacgag

SEQ ID NO: 162 - DNA, 32 bp, Artifical Sequence
caccccttaattaaataaagtgtattagggtc

SEQ ID NO: 163 - DNA, 53 bp, Artificial Sequence
  Primer
cactttatttaattaaggggtgatgactgattgttaagatggtgttaatattc

SEQ ID NO: 164 - DNA, 29 bp, Artificial Sequence
  Primer
atgtacaaaataaaagatgttgaaacgag

SEQ ID NO: 165 - DNA, 33 bp, Artificial Sequence
  Primer
tcaccccttaattaagtaaagtgtattagggtc

SEQ ID NO: 166 - DNA, 55 bp, Artificial Sequence
  Primer
agaccctaatacactttacttaattaaggggtgatgactgattgttaagatggtg

SEQ ID NO: 167 - DNA, 33 bp, Artificial Sequence
  Primer
gtggtaaggtaaggtatggaaggatggcagtag

SEQ ID NO: 168 - DNA, 1173 bp, Staphylococcus phage SP5
atgtacaaaataaaagatgttgaaacgagaataaaaaatgatggtgttgacttaggtgacattggctgtcgattttacactgaagatgaaaatacagcatctataagaataggtatcaatgacaaacaaggtcgtatcgatctaaaagcacatggcttaacacctagattacatttgtttatggaagatggctctatattcaaaaatgagccccttattatcgacgatgttgtaaaaggattcattacctacaagatacctaaaaaggttatcaaacacgctggttatgttcgctgtaagctgtttttagagaaagaagaagaaaaaatacatgtcgcgaacttttctttcaatatcgttgatagtggtattgaatctgctgtagcaaaagaaatcgatgttaaattggtagatgatgctattacgagaatcttaaaagataacgcgacagatttattgaacaaagactttaaagagaaaatagataaagatgtcatttcttacatcgaaaagaatgaaagtagatttaaaggtgcgaaaggtgataaaggcgaaccgggacaacctggagcaaaaggtgaagtaggtaaaaaaggagaacaaggcgcacccggtaaaaacggtactgtagtatcaatcaatcctgacactaaaatgtggcaaattgatggtaaagatacagatatcaaagcagaacctgagttattggacaaaatcaatatcgcaaatgttgaagggttagaagataaattgcaagaagttgaaaaaatcaaagatacaactctcaacgactctaaaacgtatacggatacaaaaattgctgaactagttgatagcgcgcctgaatctatgaacacattaagagaattagcagaagcaatacaaaacaactctatttcagaaagcgtattgcaacagattggctcaaaagttagtacagaagattttgagagattcaaacaaacactaaatgatttatatgctccaaaaaatcataatcatgacgagcggtatgttttgtcatctcaagcttttactaaacaacaagcggataatttatatcaactaaaaagcgcatctcaaccgacggttaaaatttggacaggaacagaaaatgaatataactatatatatcaaaaagaccctaatacactttatttaattaaggggtga

SEQ ID NO: 169 - DNA, 1173 bp, Staphylococcus phage SP6
atgtacaaaataaaagatgttgaaacgagaataaaaaatgatggtgttgacttaggtgacattggctgtcgattttacactgaagatgaaaatacagcatctataagaataggtatcaatgacaaacaaggtcgtatcgatctaaaagcacatggcttaacacctagattacatttgtttatggaagatggctctatattcaaaaatgagccccttattatcgacgatgttgtaaaaggattcattacctacaagatacctaaaaaggttatcaaacacgctggttatgttcgctgtaagctgtttttagagaaagaagaagaaaaaatacatgtcgcgaacttttctttcaatatcgttgatagtggtattgaatctgctgtagcaaaagaaatcgatgttaaattggtagatgatgctattacgagaatcttaaaagataacgcgacagatttattgaacaaagactttaaagagaaaatagataaagatgtcatttcttacatcgaaaagaatgaaagtagatttaaaggtgcgaaaggtgataaaggcgaaccgggacaacctggtgcaaaaggtgaagcaggtaaaaaaggagaacaaggcgcacccggtaaaaacggtactgtagtatcaatcaatcctgacactaaaatgtggcaaattgacggtaaagatacagatatcaaagcagaacctgagttattggataaaatcaatatcgcaaatgttgaagggttagaagataaattgcaagaagttaaaaaaatccaagatacaactctcaacgactctaaaacgtatacggattcaaaaattgctgaactagttgatagcgcgcctgaatctatgaacacattaagagaattagcagaagcaatacaaaacaactctatttcagaaagtgtattgcaacagattggctcaaaagttagtgcagaagattttgaggaattcaaacaaacactaaatgatttatacgctccaaaaaatcataatcatgacgagcggtatgttttgtcatctcaagcttttactaaacaacaagcggataatttatatcaactaaaaagcgcatctcaaccgacggttaaaatttggacaggaacagaaaatgaatataactatatatatcaaaaagaccctaatacactttacttaattaaggggtga

SEQ ID NO: 170 - DNA, 34 bp, Artificial Sequence
  Primer
aagactcggaagaaggtagtcactaaggaaagtg

SEQ ID NO: 171 - DNA, 56 bp, Artificial Sequence
  Primer
ccgtaaatcttagaccgttgtcactgaatcgcatgtcaagttttacatagaaatcc

SEQ ID NO: 172 - DNA, 38 bp, Artificial Sequence
  Primer
atgcgattcagtgacaacggtctaagatttacggcagc

SEQ ID NO: 173 - DNA, 37 bp, Artificial Sequence
  Primer
ttatgctgcgttacgcccgattttctcggcaacgtcc

SEQ ID NO: 174 - DNA, 55 bp, Artificial Sequence
  Primer
ttgccgagaaaatcgggcgtaacgcagcataaaaggtgatgtgggtcttgatagg

SEQ ID NO: 175 - DNA, 35 bp, Artificial Sequence
  Primer
gcaacactgtatcggctacttcaaagtcttctctg

SEQ ID NO: 176 - DNA, 492 bp, Bacteriophage; identical to SEQ ID NO: 138

SEQ ID NO: 177 - DNA, 53 bp, Artificial Sequence
  Primer
catatcctgcgccagtcgcgacatacaagggattaagcagttcttacccaagc

SEQ ID NO: 178 - DNA, 34 bp, Artificial Sequence
  Primer
atgtcgcgactggcgcaggatatgaaaaaactgg

SEQ ID NO: 179 - DNA, 27 bp, Artificial Sequence
  Primer
tcaatcagtatacccgtatacctgctc

SEQ ID NO: 180 - DNA, 50 bp, Artificial Sequence
  Primer
ttgagcaggtatacgggtatactgattgatgactgattgttaagatggtg

SEQ ID NO: 181 - DNA, 51 bp, Artificial Sequence
  Primer
catatcctgcgccagtcgcgacatgtcaagttttacatagaaatcctgtca

SEQ ID NO: 182 - DNA, 34 bp, Artificial Sequence; identical to SEQ ID NO: 178
  Primer

SEQ ID NO: 183 - DNA, 27 bp, Artificial Sequence
  Primer
tcaatcagtatacccgtatacctgctc

SEQ ID NO: 184 - DNA, 52 bp, Artificial Sequence
  Primer
ttgagcaggtatacgggtatactgattgaaaggtgatgtgggtcttgatagg

SEQ ID NO: 185 - DNA, 34 bp, Artificial Sequence
  Primer
acaaatagtgaagagataaaccaggttgagcaag

SEQ ID NO: 186 - DNA, 45 bp, Artificial Sequence
  primer
ttgacgttgaatctggagtcgataggtgcgacaggttaccaatgg

SEQ ID NO: 187 - DNA, 41 bp, Artificial Sequence
  Primer
gtcgcacctatcgactccagattcaacgtcaaggtctcacc

SEQ ID NO: 188 - DNA, 35 bp, Artificial Sequence
  Primer
ttccaagacggattcgaaccgtcactagtacaagg

SEQ ID NO: 189 - DNA, 47 bp, Artificial Sequence
  Primer
ttaatgatgttatctcgataacgtcgacatggagactcagtaaatgg

SEQ ID NO: 190 - DNA, 44 bp, Artificial Sequence
  Primer
tctccatgtcgacgttatcgagataacatcattaaggttgtacc

SEQ ID NO: 191 - DNA, 49 bp, Artificial Sequence
  Primer
ttgaataaaccgttatcgccttcttaaagcaacctgtattgcgttctgc

SEQ ID NO: 192 - DNA, 50 bp, Artificial Sequence
  Primer
ttgctttaagaaggcgataacggtttattcaacaaaccctcatttcattg

SEQ ID NO: 193 - DNA, 49 bp, Artificial Sequence
  Primer
tctgtgtagttcggccaactgtagtgtgcgaatgatgcagcgaacattc

SEQ ID NO: 194 - DNA, 50 bp, Artificial Sequence
  Primer
ttcgcacactacagttggccgaactacacagataccatgaagcagtactc

SEQ ID NO: 195 - DNA, 91537 bp, Artificial Sequence
  Synthetic polynucleotide
acaaatagtgaagagataaaccaggttgagcaagaaaaatctttttattgtagtgcatatagatttattaagagggctagaacacatacgaagatagccttatcatcaatttatctaagaattataccaaaatttttagcaaaaagcaagaaaaataaaagcctgatctgctgagatcaggcttggttgattaatcctctggattaacatccaggaaatttttaatagcatcgtgcatagtttctttacgaagctgacgtccaatcaaaatatgaataggttcgactcgaccattaggtacttgatttgtgttctgttttgtggtagtcgtgtgcgcccgtttcattacagttttgccaaaaatatttttaaaattttttcttgactctttgaacgtggttatctagtatttgcatcaacggggagggaatgaccttccccactaaataaagtcctaaactggagattcaaaaatggcatatcgtgcacctaaattcatcaacaaagacaactttcgcaacgcactggagaagtcacttgatgaaaattttaaaggcaacattatcgttgttcacgcattcaattttaagtatgatgtaaacgggaatagaatcaaccattacacggcaaccatgttagatggtacgctatcaagtgaaaaagctgtactgaatgcacttgctggacgtggtaaaaacctgataaaatgtgataagagacgttatcagggtggcgcatatggttatgatgatgctgtttatcatcttgaaaatatgggctatcaagtagaaaaagctggagcgcctcaaataatcggtagtgatggttacgtaactatcttcaaaattaacaaataaagtactttacaaggggcttatagttcgataaagtaagccccagatagagagatttatcaaataaagcccttaaactaggagattctaaaatgaaattatcaaatcaagtgcgtgaaaatctgagcaaattactcaacaaaattgatttcattgaaacatcaaggaatagccatgatgttatggaatggttacacggcaaaataaaaggtcgtcgtgtagtgatttgcttatggaacagttgcagggagtataaaaaacctgtattgcaagtcaatatctatgatgacacttttaaaagtccagtaaagtctaaaagcgatttattagaatcctatgagataactgtaagtggcaaagtatcacgtaaagaggaaacaccatgttaatgactggtatcactgcaatcattgccattttcgcgctatataaggcatataaagcctataatctagcaaataaggcaatcacacagcaggttagcaataaccttgtagagagctttctagggcgtctcagtgatgagcaaataaagcggctagatatgagcttcagatataaagcgaaaacctatcagataagtgacatcttcaaagatgattttcagttagtcgatgattataattctctgataaatgctttaaatgtcagtgacttaaaagactactacgctgtaattgttcaagagttgagcaaacgaaaacaaaactgttgacactggtttttagatagattaaattacacatcaacggggagggaatgaccttccccactaaataaagtcctaaactggagattcaaaaaatgttttgtgcaggtgataaagttgtctggaatgatatagatgacggtttatgtacgaaagttgttgttatcttagaaattgattatatcactggtgttgcaactgtagcagataatgatataatctttgatgtcttaattagtgaactgtcaaaataaaatccttaaactaggagcttttaaaatgtatactactaacaacggtcgtactttaaatgtcacactacgtcactatgtgaacggtgtaatgcacttcgaggatttacaagctgaacagcacattttggattggcaagttgcaggactccaaaaaactgctacaggatacgggaaaaagattccaaccagttggaaagtatactacgaaggacgtttgcgcagaatttatcaagatgtgcaaagcaatagcgcatcgagttacattatagtaaaaggcaaaaaactgcatttaatgtaaagtactttacaaggggcttatagttcgataaagtaagccccagataaagagctttactactcaatcctaaattggagaacttaaaaatggctattaataaccgtgaattatcaattttaaaagcacgtttgaccgtcaacaggattaatgttctgacatcatcagcgcctgatgaaacattgcacaacattatcgggaagattcaaagtgttatcttagacgttgaaaatgtaaaaagttcattggctgacgttgcatcaggtatcacgctagacggcgcgcaatatgaaatgtcagacatgttaggcaaatctaaggtaatgaataaagagttagatttgaaaatgttccgatttgctgttaaagtgtggttatctgtcgagtatgatgctaactttgcaatcgctgactttttcgccacttggttgcagcgtaatttgtcaaatcacgattttcgtaatatctgcgatgcaatttatgcagaactctaaaaaattgttgacacttatttttagatagattaaattacacatcaacggggaggtattaaccttccccactaaataaagtccttaaactaggagattcaaaatgatgaattttttaaatatccctgatacttgccgactgttgacgcaaccagaaaatttaggcaaacctttcctgtaccatatgccagacaatacaccaaaaacatatagctacacagttaaccgctttacgggttacgctgcaaaaaacggttacaaggttactactcaaaaagtaacgctatttacaaatatcgaagagcttccaacaatcgctgtaaaactaatatttacgaagaagacgcaataaagtactttacaaggggcttaaaagttgatatcttaagccccagataaagaactttaccactaaatcctaaactggagattctaaaatggctattattaacggcgtatctatcgagactgtacacatcaaagacattaaagccggtgatacagttctttttcacggcgtagaaaaaactgtcactgcaaaggatattaaaggggattctttcatgggtaggactctcttcggtgattcttattgcttaggttatcttgcagttttaaaagttgtcaaaaataacaaataaagtactttacaaggggcttaaaagttgatatcttaagccccagataaagaactttactactcaatcctaaactggagattcaaaaatgaaatgttttcacggtactactcaagaaaatttcctcaacctgattaataacggtgataaaccatcaggcgcatggaattgttcggatatggacggcaatttttacgtgtatccagaaaataaaatctatggcgacgatgaggaagaaatagcatcagagggcattcagcaagctctaggtaatgccactatcaccgcagcttttcagatgaagactcaaaatattgttatcttagaactcgatattccagaggatgagctaaacgatgattattcttgtgataatatgtcgagtgtagcaagttttacagagtactttgatgtaaattggattaaaaaggtctatacaacagagtttaacgctatgtattcacctttttgtcttccttcattggataacccaaatttaaactatcttgatgagtctctggagcttcttgctaaaagtgttcaacagtcggacagtattcaggttttttgtgacatcatggatacactgacaggaaacattgcagaagaggatttaaagagctttttctaaaaacctatgcaatcaccttataaacactaatcagccccttgtaggggcttttagggggcttaaatcatgcttacaaccgtttaccttatcctttctatttgtaatggccattcatgtgattttaaagggcttgaggagttcacaggaagtaaagaaaatgctattcaagtttgccagatagcaaggcaagactatcccgcaagtgatgatattcagtgttactttaagacagaagatgacgacggaatctatttcgatagtgttgatggtcagtatgagattatcattgaaaaagactagacaagcctgataaaagtctgtaaattgtcaatcaacggggaggaaatgacctcccccactaaataaagtccttaaactaggagattcaaaaatggcttatgtaaccgtaattaccgataaagctggcgcatcttggtcaactcaagtaagtgataagatgtcacctatgcagtgcctaaaatactttgaacagtggaataaaggcgaggacacaagcccctttcaagtgatgcagattatccatgtagacaacgaagggaataaaacgacactgaatagtgagtactatgcaagccgttttgaaacgagaagtaaaacaatgaagcttttacgtgaatccggttatgcccatatcgccgcgttaatctgggatgacctgctaaaaagtcagcgtatcagctatgtaaaacctgaaaaaatattcatcagttaatcaataacttacaaaaaacttttaaaaaagtgttgacaataccccttgacattggtaactttgttcgagggggtttatctaaaagggattcacttaaaagactctttatagataagctcaaaaaattacttgcaatcagctatcaaaacaagtaaattactaatcaacgggagggatgacctcaccactaaataaaatccttaaactaggagagtcaaaatgaacaagtttaaagctatcaacttcatccgttcaaatgctgtaatgtctaagcctgtaaaagatacatacgaatttcgttgtaatggggtacactttgcaaccatcactaagtcagaaaacggggcttattatgtacatcgtcgtaatgttgcaaccgttgtagtctctcactttatgcaagctgtagcggaattattaccgttattcttagagatttacttagatgagtgtaaaaacgttcacaaccacgttaaaaaccttttaaacggttataaaatggcttatgaacgttctatcaagtccttaaacaagttctataaagcccctgaaaatactgtatcaatagcttatgatgtaagcggtgaaatggtcaacctctccaatgtagaacaaattggcctttatgacttacgtcctaacggttacgctaaaactctcggtgaaggtttaaccttcaatatcaagaacttagaaaaaactttaaaagatattgaaaaagatattgacgagacaatcaaaagtctgtaaattatcaatcaacggggagggaatgaccttccccactaaataaagtcctaaactggagttatcaagatggaaaacgtagaattaaccacactattgcagattgcaaccgacaaagaagatgtagcattatttcaccgtatcgaaagcgatttgttcaatggtgaaatcatcaaagaatcttatgaagttgtcggattcaaagatggtaaagcgtttggattctttgacctcgacaaaggcaacgctgttacaaagtatgatgttttgtcttgtgagattcttacaaaatacaacgaaaaaaggcttgcaacatacgccaatatgcagtaaattactaatcaacggggagggaatgaccttccccactaaataaagtccttaaactacttcctaaactggagaatctaaaaatggcaactatccgcgctactgttaacgagttcggtttttcctctctggatgttaaatttgacattgcaggcactgataacgcctttgaaatggtgaaaggtcttatcagtcagaccatcaaagattataatccttcggatgagttctgggaggaaacaaaacaagaagttctcaaggatggttatacttatcactattggggagaaaaaattgtctccctgtactacaacaaacaagattataactaatcgacgcagcggggctatttagccccagatacctgaacagcccctatttaaaggggcttttttacgtctatcgaatccttatacaatccctttccctcacctttctagaatctatccactgattcgatagaatctatctcataccttaaaagcaataactctatagtctattctatagccttttatcaaatcaacttaaatacaagcccataacccgaaagggaagggcaacccctaaaacgctctataaagctctataacagccttatcaacctaacttaagggattgcattaacctatcttaaaaagctctttacagggctttatagaggcttaaaagaatcttataagggtgtaagctttatcatctcgttagttatcttgtgaactactaaaaagggcttgttattgtcttaaaagtatgttataggggctataaagttactttgaagtagcttaaaagttacgtaaatgctagcccccttaacaatttcttaacaatccctacatagttatgcttttaagacacttgttagcaacttgttagccccttgttaaatctctgttaagaccacgtaaaagccttgtaagagtctttgacatagccttaaaagctcctgtgaagccctataaagagttatctgtacagttggggtgtaactactaggaagagacttaaaagagcttataaagagctatagagagcttttaagaggtatgtttaaggaatcactaagaaaggaaagggaacgataagaaagagatagtgaccatgttaatagctagttaaaaagattaaacacttgttagaaacttgttaattatcttaacaaaataactctttaaaattaacttgttagctcttgttagtcatctgttaagattctgtaaaacctatgtatcaactgttaagaaactgttacagccttgttagttctgttaagaatctgttaagacctttgaagagttgttaagaagatgtgagaactgttaagagattgttaaggatattttaaaattttgcaaagtacttgtaagggagctgttaagggctaccaagcagatatacatcctaatcagatatttttgagttccttcaaagaccctaaaaaatgacttgacagtcttattttataaaaattttaaaattctgaataattacctacacagtcttttaaaaatacaggtagaaacaggcttataagataccttgttagtaccgtgttagaccttgtgagataaggtctgtaaagatattcctgttaagtttgttaaaacagactatatagaggcttagtatttcctagtgaacacctatagagagtgtcataggtaacatagagattaagaggtgtataggagcttctaagaaggtgtagagagatgtttaaggtgattgtataggttgttaagaaggcttgttagaagagtgtttagatggctatttagaagggctatacagagggctattaagaccactagatagttactaagatactatatagtactatataactatatatagagagtaagattaagaaggttgttaagaaggatagatattttattcacatatgatggtgacccagaggttgggacaaccgataaaattttataaaaattaaaaagcccccgattaaggaggctcttaagatattttaaatcaggctttctaaaactgtcttcaatgatgacttagttgtctgataaaaatgagtgaatccattgttgttatcgaatatctgcatcataacagcatctcccttgattgggtacactcggatgtcatagtgaaatccattaaagacagcagaaccattacagaatacactaaaatcatccactgagatatactcttcatgacctgtgatttttatacagacacctttactcggtctcttagggttgatatcttccataatagacatactctgtccaccaagagataccatagtgaccactttacggttcttctgtttaaagtacattttaactttctgcaaagtgtcttcatagaacggataagacctttctacaaagattccttcaagtggctctttaccattttcaacttctctgttatgccgtacttcaaagataatttgttcgaaccagtcaagattttcttcggagagtgcttctcgaacatcactccagtcaagtactaggtagttaccttcaacttcttttaagttatctttttccatatctatcacaccattatcgtaaaacttgatattctggtactgcgaatttattactattgttcttgatgaggtcatcctctgaaactaaaaatgtaataccacataagtgtctgtaacgactatcatactcgaatatcttaaacagatatttaccatcatgataaacctgttgcacttcaccttctgcaacaatctcgcctgtaataaaattttttagtttatacacattaccaactttaggtactgttttcatctcaggctcttttagtgctacacctatttttgcatcaccgagtaaatgagaactctcaaaagctacgtgtttcatataagcttctgagcattcccagataaaacagtgtacaagaaccttagcagcatgtcttgaacagtttaacttatcacaaatttctgtgtacatctcatctttagtcgagttgtcaagcattgctctttgcactatctcttttactttcataagctctccgaataaccctattaagcatctctaaagtcagttttccagactctaaatgtggcataacaagctttaaagctttttcaacatcatgcacaacatctattataccttcttcataggcttctacaaggatatcttttacgttttgttggttatctttttgtggtattgctagacgcatattaaactcatttgcttgagggtggtcactaccacgccagtaaccatctttgttaaagctgatgtagtcaccgtggtaaaagtgtacaccattagctttaaacttctccagcacaaggcattgaattgggtactcagtattccactccctgactcctataaccttcactgttgcgatgtactcctgtgtttttgcatctatgatgtcaagttcttgaccagctatgatttgcatattcgctaccttctaagtttctacaaaggggctatcaagtaacccctcaagttattactcagacttttcagtcttcttgtcggatttcttactagtcttcttctcagctttctgctcaggctccttctcagaagttgccttaataaccatatcaagaagctctgataagtcactcttcagtaaagtaacaggctgctcattgtagaagtttttgtcaagataaactttaaactcttctatagaaggaaatccaaaaattggtacaggtgtcttaaccattacttagtctctccataagcatctttcaagattgccttgttaatcatttcagcgattgcaaaacgaacacatacagctataattgtaggttgcattctttacttacctcttcaagtttaacttcagagtccttaagtcgtttcttatgaactctgaatctcattagtgagatgatgataccaactaaagggacagcatacaagtaccaaacatcatatacctttgcagtaatctgtgtaatggtcaaatcttgagctatggaactgattgctgatactgccagtaatgttgccaagaaaaatgccagtaccattactgtactcaaacaacctctggcatggtgttcatgcttaatgcacttattcttttcgtcaacaactctgttgtagtcgtttgtaaagtctctgtagaatgctttcaagtattcttgagtgtagccttcaaagcaacctgtaccataccaataatcaccaccaaaatgtgctatgataccggtatctccatttggttttgttactcttagggagacatgatgaccagtcttctggtaatctatcttgtatctttcttcgtaaatcattttccaatccctctcaatcgtttgttccactcaaggtcaacaagtctttgtaggactttacctctaggtgttacaccttttaaatctgcgtcatagcaatggtaaaaatcaccttcagcgtgtctgccatagcatcttcttatactctgacttctacgatattgttctaatagagacagcttgtagtaatcttcaactgtagttagttttttcattctttcaccatagcatttctgaactgacgttgagtttctcttgtaatttcgtctggagtaaaccctgctttcagcatatctctgaaaagaacttctaagtgattcttttcaataatgtaaattgcattctgcacagatgttttaagttccttcaggttactgctaatttcttcgcacttgttgacaatctctgtatcaactttcttaaagactggcatggtatatctactaccaccattagcagcatccatgaaaaatttaaaagattcctcagagtcctttaaagcaatccctataaagttcttgtaagcacctgtgaaagctaaagattcaatctcagcagttgagtatacagttcctgcacacagtcttgcggaggtactaaatgtgtggtttggtgttatgtcaaagtctaagttcttcagtggtcgaaaataaactatcccattgtgtgagatgtgtgttacaacagcctcaacactctttgaaggattctgtttaacatacaaaataattttatcgtgttctttcactttagccatatctattctccagaaactaaaaagggaactacctctcgatagctcccatcataatcaatattgtatactcggtcaagagtattttttaggcagtaatgcactgcgcttgttactctcttcactcaacagtgcgataaattcatcacctttacccttccacggactaaatgtagggatgtgttctctgatagcatcaatcactgttttcagggcgttattttttaaccaccaatcagacactgctgatgctacaatataataagcaccatcatctgtgaagattggctcagagatacatggtgaaatcatagtggtgatgatagagccattattcatgtaatatgttcttttttcaaccttatcaagaagcttatggaggtctgcaaagagactcacaacttctttatggtcaatatctttttcaagatttgctctgtatttcagcagtgcagcatcaacctctttatcattgaatttgaagtattggacttcttcattcacacatacactgatattgttggtgtttatcgtcaatttgcacagtttgactggagaattgatgttagtctgaaaaagtgctacacagccttctacatttccgaaatgttttactaatgtaacttctggttggatatgctcatgttcttctgacattacagtttcctcattaaatactttttaagttgtgtgttaggtttctcaaaaacttctatagaagatatcttaacagactcaccacgcataccagtatgtttgaatatgtagtactctagcatccctatgtactttgctggtaagtcatgcttgacatataccgtcacagaatcttcaaactcaacaacctttgtaccatctttgtagttaaactctttaggatggttgtagttgtctatatcgtacattaaaaagagtcttttacgttgtaagtcaagcttatttgttaaagactctttaatatctgagaagtttttgtacactatgacatggagcttactcatcgttaaactctctgacgaagaaatagttgactttgttattacctaccataaggtcaaagcaggtattttcaaaaggtttgttgtaggcatcgtatgaaatatatgggtcagctacttgcttagtgcttaacttcttacttgatgtatttaagaggccaccatacagcttcttgatagcctcttctacaacagaccagataatttcgtcagtaatttcttcgtacaggtcaagttcacgctctagtgagaagtcacaaatagggaaaacaacctgtactttactcattaacgaataacctgtgagacttgaattgcttcagttactgacaagtcacctactttctcttctttgataaaagtgaatgtgagttcaacaggttcttgctcttcttgctcaactggaatgccattaagctcatcgcggattgattgagttgtccagtcttctccaccatctggataatggatggcgtaaagagggaactccatatcataccagccaaatacagggcaaccatctgcatcatctcgcattctgcgaagtgtgctacctgagcctgtaaagcgaagactaatatttccattacactcaaaaatcactgcgtcggcaagtccagcatcttctcgaccatcatggccaaaagtgtcaacttttacttgaatctctttattcataaaaacctctctctgcttgttctatttttgctcttaaagcttcgcaatgttgtaaatgatatttagcttcttgttcatgtgttgctaactgcctttccagaacagatttatagtaacctgcaagttgctcttttgtcaatgggtgctctgaaataatatcaagtccactttcaccaagagggttgaattgtccatgttcgttgacattgtaagtctcaaacttgaacaggccattgttcacagactcaataggtgacaactcaacaagctctacagtaaaccgtgtatataccttgtcacctcttgaaaccacattgttcccgacaatgcgtacaagcgagccattacgagtgtacttaaaagttccaaagtcactagcccaaagtttcatagctttctccttagaaaataaaaaaggctcccgaaggagcctatgaagatattactttggatatacactgtcaagataaatgtcagcttccatcctacgtctgtttttcaggccgtttgaagtgaccttcttacctttgactgtaactttgttccaccactgcatagcttctgcacaacctaccttattaccatcgttgtggcgcttgataaatgttgagtcctgcatagctgtgataccgatgttgtatgtttcacttacaagtgcatcgaactcattctgagaagttggaaccttgatagctttgttcactgctgcaacgaacttttcaacatccgcgagaagatactgttcagcttgttcagcggtgattttcattcccatcttaacaggcttaccagcaatacggatagtcccatatccaattgtagggattccagcagaatcttcgtaagcctctagcttaagaccttcaaagaacttaatagcttctaaaccttttcttgagagttgcattatgcctcccctgctgggttaactgtaactgttgctgcattggatgttacagagccacctgcaccagtaactacacaggtgtaacttcctgcatcagcagtggttgcaccttctttggtgtaagttgcagtagttgcatcgaggatgtcttcctcacctttcttccattggtaacctgtcgcacctgttgccacaacattcaacgtcaaggtctcaccttcagtgatttcttgattggttggctgttgagtgattactggaagtgcatttacagtaactgtggctgcgttagatgtgacagagccacctgcacctgttacaacgcaagtgtatgaaccagcatctgttggcagagcaccagacttgctataggtagcatttgtcgctgaaggaatgtcagagccatctttcttccactggtaacccgttgcacccgttgcagtcacttccaagctgatgtttccaccctcattgatggtctgactagaaggttgctgtgtaatcacaggtagtgcgttaacagtaactgttgccgcatctgaggtaacacttgtcccagcctctccagatacaacacaagtgtataaaccagcatcagaaggtgctactgactgttttgtgtaagttgcagaattggcactagggatatcctcaccatccttcttccactgatatccagtggcgttagttgctagaatgcttagagtaagtgtgtcaccctcattgactgtttgacctgttggttgctgagtaattgctggtggcttgatagcatccttcagcttagcattcaacattgagaacggattaactcttgccaaccattcacagtaaatagtgtcaacatctttaccattgatgattgcatactgcaaatccatgaagaaatcagcagttctcatctgtgcaccaacactgtaaaggagttcatcactaaaaggaactttatagtctggtttatagtcaaacttctcaacttctgcaatatcagcttcaggccaatacgagctataggtaagtggtaaaatagcctcttgatatgttctaaaatcatacctcttaccagcctttacgtttgcaacgaagcccttcacaaactctttgaagtctgggtaagtctttgctttaatcatttcttttcagcctctaaatgtgcgtttagtctaaaataacctttgtgattcggagatacatcaccaacaacaatacctttaaccttataacctttaccaattacatactgaatatccataaggaatcttccaagaccaacaatatggaacattggatataatagattctcagagtctggaatattgatttctggtttgtaggtgcgttgttcgcttgttggtgtaatatcttcttcgggccatttactgagtctccatgtcaaaggtgttgggataacatcattaaggttgtacctttcaccattttgcacggaattgatataggattgtaggaagcaataaaagtcttttgcactcttagctttcattaaatatccttataaatagttaaaggggcatcagcccctattcacacttaagctttggtcttaagtaggttcttaagttttttaagattcatactctcatcaaacttaaaaccaaatccattgacataatcaatgaactcggatttcttactgagtgacaatgcgtaactcatatcaaagttcttacttgtttctgcgtctggactagagttcacatcaaatgaaatttctgtaggctcttgcttactttttctcatattatcaatcaacaaacatgtatagtttgctggatagaaatttacactaccatcaacgtagctgtacttattattatggataaggttggaaaataccttaaggaatgtttctgagtcgtggcaaacaagtttgaattggctgctctctccaagcgcaactaatgagtacggactttcactatcaaagtcataatttggattcgatgacgtcactgttacacgcatcaagttattagcaatagtcttctgtttaaaagaattttgaacatagtgaagacccctctcacactgattgactagctctttaagtaggtcatttgcatatggtgagttaattgatacagagccgtcactattgtaattaaaacttactgttaacatttttcagttctcctgcgatttataattttgctgcaatagagaaacgaagtaaactcactggaagaaaccactaagtgttgttcactagattgagccattgccctgaaatacattccagtcaaagcatcatagtgactattctttccaattgaggttatatagccatgactctttgcagtttgatataaatctataatatctgcgatttctaattgggaactacacatagataatcctcttgtcttctgtaattttgaaagaacaggtacagaccaatttcagaggatgaatagtagattaactctaccctttttgattccttacagtgattggtattcttacctttcttcggtttatttgattttctcattaagtctcctttgtagaacaaggcagacctacagctttaagtaagatggtacagtaatccatacaacaagtcaagaactattgcaagttaaaaaagttgttgacaaagtacttgacaaggtgtaggcttataaatacttagaagataacttaaaaggttcctctaaaaaggctatttaaacagatatctttctggatatctatcttttatcttaaaagccttttaagaggtcttataagaggcataccaatgaaaaacagaacaaacaaaggccagtttaaaaaaggccagtctggaaacccatctggaagaccaaaaggctctcgtaacaaaagttcactcgtaaaagctcaactgaccattgataattctgctgagtttgctgcaaagttgtttgaagcgattgttacaagggacgctgctaagcttgcagagtttgggttaaacacagacgacgtaaccatcaaaagcatgattgaggtcggtaaaactatcatgacccactcagcaggtgaaatgaaagcaattgcagcagacactaagaagactcctgataatggtggtcagtctcagacagacaacaaaccaacgttctctgctgttgcaacccttaaaaaataattttaaaagatgttgacagactctataaagttgctctaaagtctgtcacatcaaacaacaaatgagagaagagagtaaaatatgagcgaattatttaaacatgcgcaccttcatgcaggtcgaactgaaaatggtgctgtaaaccatacttcatcaatgtctgctcttgtagacttttacaaagctgctggttcaagccgtagcaatgtagaaatcttaccagacctgttctacaaagctttgcgtgaggatgttgatgttgcagttcgtattttgcttcatatgcgagatgtacgagaaggtatgggtgagcgtaaagccttcagaactgttttgcttcaagcaattgaagacaaagttttagagtctacgcaggttcttcgcattatggataagattgcagaacttggtcgttttgatgacttcaaaatcttcgtaggtactcgtttcgagacagatgccttcaaacatttagaagcagcattactagaccctgcaacagcaggtttggcggctaagtggttaccacgagtcaaaccacgtcataagcagtttgtaaaacgtttctgcaagtttgccaacttgagtgagaaagagtaccgcacactgttgtctgcactatctgatacagttgagcaaaaaatctctgctaatgagtttggtaagattgactacagcaagattccttcacttgctgctgcacgttaccaaaaactgtttaaccgtaaagatggagagcgctacaaagcttacattgagtccttatcaaagggcgaggctaagattaatgctggtgctgtttacccatacgatgtgattaaatctgttaagtatggtaatgcagatgttgctaatgagcagtggaaagcactaccaaactggatggcagaaggtgaaaacatcctatgtatgactgatgtttcaagctcaatgtcttgggtgaattttggttcaatcactgcacttgatattggtgtatcacttgccttgtatgtagcagaacgcaatacaggttgctttaaggatgagttgatggtttattcaacaaaccctcatttcattgaactgagtggtgatttacgaaaccgtcatcgtcaggtgatgcgacacgttgaatatggctcaaccaacttacaagcagcttttgaccgtattcttgagacaggtaaaagaaacaacttgactcagaaagatatgccaagtaagcttatcatattctctgatatggagttcaatcaggttgatggagctaacggtcgtacaaactttgaagcaattcagagcaagtacaaaaaagctggatatgagatgccacaactggtattctggtacttagcaaaccgtaatggtacttgcgaagtgtccgttaaggataacggtgtagcaatggtatctggtttctctccagccactttaaaagctctgcttggtggtgagaagtttgacccaatcagcgtaatgctcaaagcagtaatgattgaccgttatatctggtaaaaaagttttaaaaagggtattgacaatgtgtttaataccctttaatatgttctacatagaaacgaaatgagagcttttctaagatactgaaaaatattttaaaaaagttcttgacaaccactaaaaaataatgttaaagtggttacatagagtttgaaaagtttatctctgtttagctcagcttggtagagcgttccgtttggggcggtaaggccggaggttcaagtcctccaacagagaccaaattaatgttccagtagacaaaatggtaaagtcaccactctttcaaagtggatatctgagggttcaaatcccttctggaacgccagttttgacagaagaccaattacagcaaacttaatcttattcatctgaaggtaaatcggacaaagaagagatttggtctggtcattaagaattgcgggtatagagaaagggcgtctcacatgtctcattagcatggtatcggcaggttcgactcctgcacccgcctccaaatttacagaagaccgtttacagcaatatttattaaatttttagcggaaaaattgaaagatacggtctggtaatactaaacatggttaggaagcacataaggtatgtgcggtcgcctgttaagcgaatggcacagggttcgaatccctgactaaccgccaaatttaggagagaagcgattgctcaccgatttgtaaggtgcaagtccttagcctgaatagaaattaaatgtgtcgttatcccgtagatggtagcggtggggactgtaaatcccttgtcattgagactcggtaggttcgactcctacacggcacaccaataaaggttatgtagtttaatctggttaaaatactcccctgtcacgggagatgatgagggttcaaatcccttcgtaaccgccaattttgagagggctatttagcccctcccttaaagggttcttacgagtatcctttaaaggagcggaagaccaaatacagcaagtacgtatgatattttcaagccaatttaattttgaaaaatttaaaacttggtctggctcaacaaatttacagaagaccgtttacagcaaaacttaaacaatctatttctccggtaaagaaaaggtgaaggttcgattccttcactcggcagaggtcgagttggtgtaatggtagcacttaagatgataaacaacggtctggtaattatctttgtagataagttattaagcttacctgtgagtatgcgaccacaaagggtgaaagggtaaattctagatttaaacccaaaaaggcacatcgctacagaccttaagcaagtctgggtagcttatctacaaagataatttaatggaagtgtagcagaatggtgatgcggcagacttttaatctgacaggcgatgggttcgaatccctccacttctaccaatatggttcagtcgcagataaggtaatgcaggggtttcataagccctatgaatatgggttcgattcccatctgaacctccaattgtgggttagcataaatggtaatgcaaacggctgataaccgttagaagagggttcgataccctcacctacaaccaatttcaataaagttgttgacattgagatgtgactactttatagtaaccttagttttcgttgcgtagcgtctattttgcaaatttaaaataaatgcaaacgacaatgtttttctggcagtagcttgataggctaaacaccagtgaggtcttccaatccctcatcaaagaatttggcgtactcgcccacggtatgattaataaggtgggcatctttaagggctttctaagagagtctttaaagataattacggggcgtatctcagcggtcttctaaaccgccgttaaccgagtaagtggagtatgcgggttcgagtcctgccgcctcgaccaatttagttagcagattacttagacgacctaagcgggtcttcctgtagggaggtggtctgtatctcatgttttccagaacatgtaaataatctgagaaggggctttacagtgttgagataatacggtaagcttcgaattatagtatgggacgatgttaagactctaaggcatgagcaacggcctccaaaaccgtttcaaaggggttcaactcctccgtcccatgccaaagtcttattaggggtaggtagcggctaatggcagccaaacagtcttgaaaactgttgccactgtagagatacggtgagggttcgactcctttacttaccgcctaataagatttttaaagccaagcttcattcggatgttgctttggtatccctcgtgtattgtcgtacacactgataaaacacctagtaggtgtcacggagaagagataatatcaagctctccaaaggttctagtcaccggattaaacaagactatgcaaagaccttttaggtctttttagagggcttctaaggttattacggcttgttgtggaaccttgttgcttaggttcttagaagttctctaaaaagatttaatgggagattgacggtaattggtaaacctaccatccttagaagttggtgtttgagggttcgaatcccttgtctcctaccaaattaatgcaggtgtagcaaaatggttatgcggctgactcttaatcagtaagacgatgggttcaattccctccacctgtaccagacattggggtcatagtttatatggttaaaattcgagttttgcaaacttgggaactgagttcaattctcagtgactccaccaattagtgcatccatagtttaaacgggaaaattacagtcttccaaactgaggttgagggttcgattccctctggatgctccaaattaatgctgctttcgtataattggctattacacatcccttgtaaggatggagatgcgggttcaagtcctgtgagcagcaccaattcagaggtcaagtgaaagaccgctttgagtcaactgaagaccgtaacaaattccacggagttgagttagcggcacaacttcagacctctttcacactcgcttagtttatatggtaaaacatcacccttacaagatgaagaaaaaggttcaagtcctttagtgagtaccatgttccagtatcccaattggtagaggatgcaagctcaaaccttgtactagtgacggttcgaatccgtcttggaacaccaattttgcaggattagttcaaatggatagagcaacagtctacgaagctgttaataggggttcgaatcccttatcctgcgccaatttaaagaggctatttagatgagatacttaaagtatgcttcatggattttcttagctttgttagagccatttgcagaaatcttagcagttatcttagcaccttttgtagttccattctacagtgagaagaaaggccacttacctttcggatttagatggatggagacatatgacaacccaattgatggtgacgaaggtcatatcgaacgatgggctaagattagaaagattggtaagctgggtgtctacatgcagagagtcggatggctctggagaaacaaagcttataacttctcttaccatgtattaggaagagatgtaaaagatgttactaagtggaaaggtaatatcaacgtaagttctgaccctgaagataatcagacaggttatctcctaatgtggaacagtaatgcttggggattattcgcttttatcccatcaattaaagtctttggtaaacagttttactggagaatttatattggatggaaactaaaaagtgttgtcccagaagaaagagcattctcaaggggaagagttatgttggcattctttattcatccactaagaaagtaaagatttaaaggggattagtttacaaggttaaaacctcggtctttgaaatcgaagaagttggttcaattccaacatcccccgccaatgctccattactccaattggcagagaggccagacttaaaatctgtgttatgtatcggttcgaatccgatatggagtaccaaatttagcggtatagcataactggcaatgcaacagtctctgaagctgtcctattaaggttcaaatccttatgccgctgccacttctaagggttcttacgagagtccttaaatgtggccttatcataaatggtaatgacccatgctgtgaacatggtctatacgggttcaaatcccgtaggtcaccccaatttatagtccaagtagcttatatggttaaagcgcgtgtctgaaaaacatgagaagagggttcaaatcccactggactaccaatttcaaaggtgcttaatgaaagagatgacagaacaaggtaaggagatttttaatctcttaaaaaccggtaaagggttttctaacccacttattactggtgcagcagttctcggtggaaccgtagctgcttctacatcacttgtaagctctattagttctgtaacagaccctacaatgcaggagaaacttgttgctgctggacttacaacagtccttctaaacagctttacaacaagccttacaagcactacagcaactactaagaccctgacagactacggtcaaaaatctattgatgagttttcatcacgtatgcaggtagcaaaggggtattccaatgttatgggtgcagcaggagaacaagttggttgtacaccgttcagtggtattatgggtgttgctacagaatatggtcaaaaagctattgatacaattaacagtacactagagagtgttaacgatgtattaagtgacttacaagacgctattgatgagggtcttgatactatttctgatttagctaatcaggctgttagtaagattaatgaaggtatttcaaagattacagcttatgcagatgaagttgtgcagatgattgaagaagaagctgcccttattgcagagtaccttaaaacgaatatcaatgggttcttagcaggtatcttaccagactggtttgacgatgcctgtaaaactggtgtaattgacactattgcaacaccagaaatgaagaacgcattacagaaataaatggaagattaaccctaaaaggtaagggagcagtttgctaaactgccagtagctgagaaatcggtgtaccagttcaagtctggtatcttcctccaatttgaatccgtgacagaaatggctatgtgcctgtctgcaaaacaggtttataagggttcgagtcccttcggattctccaagttattttactctctctcaattaaaataataataataatgccctgctataagtattcttcctttcgctaccgaagagtatttttagacagggcttttttacagagttatactttataagaaggcttatacagtatgtctctgacgtacattgtggtttctccttgacggtctctgtgccgtcttttttaaggggaaacatggttaattatttggagaaaacataatgagtgagaccgtttacaaagaactttatgaagctaataaaaagctagaatttatgcagaacactatcatggcaattgcagatagattatctgtagcaacaggcattgatattaaagaagcatctatggatgcactccttgatgctgttgatgaaaagttcgaagttaagaaagaagagactgctacagactctgaataattctatttgcggaggcgcttaatggacttaaatgctgttaagcagaagcgagtggaagatgttaggaaagtcctagctggagagttggggctttctgatgaagtaaaagaaattattaaatcattcggtaaagacccctctaaattccttccaactcaaattctgactttattaagatacacaccagaccaagttcgcctcatctttaaattgatgactgataagaactatgtagcccctcaaccgggttctcaagaggtctttttaaatactaatgctgacttggttctctatggtggtgctgctggtgctggtaagactgccgcattgttaatggactctttaagatttattgaagaccctaactataatgctgtatatttccgtcgaaatacaacacagttacaaggtggtttatggcctgctgcaaagaaactatttggtaagtttggtgggattcctcatgagcagaaaatgactatcacattcccttctggggcaactatcaagtttacctacctagaacttgaaaagcacgctgaaggtcatcagggtattgaatactcagcaatctactttgacgaaggtacacacttctctgcttcacagatttcatacctacagactcgtctgcgttctggtgctgaaggtgattcatacatgaagatttccatgaacccagacagagaccactttatttatgattgggtagaaccattcttagatgaagaaggttatccagaccctgaaaagtgtggtcgtattcgttggtatgtaatgaatgatggtgtgatggtttctgattgggagagagacaagattcttgaaatgttccctcttgagattcctcaaacatacaccttcatctctggtacgattgatgataacccaattcttgacttcttagaacctaagtaccgtggtaagttggaaaacaacacccctgtaaacgttgcaagacttcgtttcggtaactggaaggctcgtgcagaaggttcaaactactggcaaagacaatggtgtgagattgttgattcactcccagaagatgtatttgatgttagagcatgggacttagcagcaactttaccatctgagattaaccctaatccagactggacagcaggtgttaagatgggtaaatctaaaaaagacggttgctattatatcattgatgtagtaagatttagagatagaccctctggagtcgaaacacaaattaatttgactgctgaaagtgacggtaagcgaactggtatttttatccctcaagacccaggcgctgctggtaaatcctacgcaacatccctcatcaggaaacttgccgagaaaggctatcgtgcaagagctaaaccaacaaataaagataaagttacccgctttgcgggattttctgctgcttctgaagctggacttgtaaaagtcttgagaggtagttggaacgaagcttactttcaagagcttgaaggcttttgtggtgatggcaaaactaaagatgaccaagtggatgctaccagtgatgctttcaacagtcttaacgaagttaaattattcaagccaccatcaatgggtgctcacacagacttagtgagaggaaacccatatgaggggcttagacgttgatagctaggtgagaagaatggcagatattacagaaacacaagaaagcttaccaccatttagaatgggtgaagtaggttctttgggtctgaaggttaagaatggaagaatctatgaagaacctcgtcaggcactaaggttccctgaaagtattaaaactttccaattaatgatgcgtgaccctgctgtagcagcatctgtaaatattattaagatgtttgtcagaaaagtcaactggagattcgtacctccaaagggaaaagagcaagaccctaaaatgcttgaaagagcagacttctttaattctttaatggatgacatggagcatgattgggcagattttattaattctgtaatgtcattctgcacttatgggttttgtgttaacgagaaagtttataagaagcgacagggtaaaaaaggaaagtaccagtcaaaatttgatgatggtctaattggatgggctaaattaccaatcagaaaccaatcaacacttgataagtggtattttgacgaagactttagaaaagttactggtgttagacagaatctgagaaatgtttcacatattgctggagcaattaatcttggagaaagaccactaacaagaaaacttccacgagctaaattcatgctgtttaagtatgatgatgaatatggaaacccagaaggtcgttcaccattacttaatgcctatgtaccgtggaagtataaagttcagattgaagagtacgaagctgttggtgtttcaagagacttggtaggtatgccaaagattggtttaccaccagattatctggatgaaaatgcagaacctgaaaagaaagctttcgtacaatactgcaaaactgttgttaatgatatgattgctaatgacagagcaggtttaatctggcctagatatatcgacccagatactaaagaggatatttttgagttctcattagtctctagacagggtgctaaagcatatgatacaggttctatcattgacagatattccaagcaaattatgatggcatttatgtcagatgttcttgctatgggtcagtcaaaatatggttcattctctcttgcagattctaagacaagcttattagcaatgtcagtagatattttgctgaagcaaattaagaacgtaattaaccgtgatttagttgcacagacttatgctcttaatatgtgggatgatgaagaacatgtacaaatcacatatgatgatatcgaaactccagaccttgaagcaattggttcttatattcagaagactgttgcagtaggtgctttggaagttgacaaagagctatctaacaaacttagagagcatattggtcttcctcctgctgatgagtctcaaccagtatctgaaaagctttctccaaatagccaaagccgctcaggagatggttataagaccgctggagaaggtactgcaaagacaccttcagcgaaagacccaagcacagcaaataaggcaaataaataatggctgaagttatctctatttcaaatgctacacgagtgcattcgtataggggtgtccttatcattactgataagttatctgtagaggctggctcaagggtcagcctttcaggttatgttagtgatggtggaatctctgacgttttcactatttgcaggttacttgatgcaccaatgagtggaaaaccgtttatttcaggaaattgtagtgaaattgttaaaattccatttgacagttcatgccttttgggtgtaaagttatataactgcgagaataaacgtatcaatgttaatagcattgaagccgctttcattaccctcgatactgcatttcaatctccaatgacagttaataaagaaacaaacagacttgaatacattttttcacaaaatgattacaaagtacttgtcaaaggtaaagtatatgatatgattgtaaatgtggtagatgaatctggtaaccattcaacagtccttaaacaaaaagtaaggtttaattaatgggaacattaactattgatggtaagaataaaatcctcgccacgctaaccccaacgactattattttacacaatgtagacccaacggcagaccctacagcaaataaggttactcagccagtggctatttatttttctgaaccggataatggcttaattgcctcagaagacacagttaatattactgtcccagcttctgcaacggtctcacactatagcttgtgggatgctaacgataaatgcgtggcaactggtgctcttagcaaacctcaattctttgctgaagaaggtatctatgttatctcttcagtctctgtagatttaaacaaatagggtgagtaaaaatgagttcgaatatcttcagacttgctgatagattattcaaccaacctttactagccactgaatcattagctcactcagcagcaacttatgtgaataacagattgctgggtgatgtccaagcagcagtaaactttgataaacccaaaggtgaagcaagaagtcttttaaaagtaaaagatgacattgctattatccctattatgggtggtttaacccatcgtatgacattcattgatgcaatgtgtacaggtggattaagctcttatgaaggtttgcgtagaggctttgacgaagctttagcagatgagtcaatcaagactattgttctgcacattgattctggtggtggtgaagcttcaggttgctttgaattagcacgtcacattatggcttcaagaggccaaaagaaaattattgcttatgtagatgagttcgcttgttccgctgcatacgctcttgcatcttctgctgaagaaattattgcatcaccagatgcagatgttggttctattggtgtaattatggttcatcaggaattaactaaggcatttgaaaagaatggcgtaacaattaacgtcatcaaagctggtgagtttaaaggtatgggttcaccattccaagcactctcagaagaaagcaaagaaagacttcaaaagagaattaatgatacctacgcaacctttacaggttttgtagccgaatctcgtaatctctctgaagaagctgtaaagaatactgaggcgaatgtttattctgctcaggaagctcttgaacttggtttaattaactcaatcatgtctcaagatgatttcttaaattacttacaaggttctgaagaggctcctgtaagtttaaacgttaacaattcaggtgaagaaatgactgaacaagaaaagcaagaactagaagctttgcgtcttcaggttgctcaaatgaaagctaaagaacaggaagctgctttgtcagatttgactaataagatttctgcttctgctgaagcttttggatttgatgcaaaagaagctgcaacgactattttaggtgctggtcttgataaccctctgagtgttctgtttatgaatgctatggaaggtgctaaccagaaacttaatgaaactatcgcgtcccatgcttctgcaatggaagaaaaagaatcagaaattaccaagctgaaagaaactgctggtgctgttcttgaacattccaacgctatggaagaaatgggtaatgacggcgaagctgatttggttgaagaagaaaaagaaccagctaagaatgcttccgaagacaccgctgaacaacgcaaactggctctccagaatgctctaaaatctcttatcaaataaggaacacaataatggcatatcaagattttactaagttaggtaaaagagaacctctgaatgatatcattctttgggaacaggttaccccaacaggccactctcgtaaagagtacactccacaggcatctacagaatatcgtgtaggtgaagttctgaaggaagacggtactaaagtcgcagcaggggaagaagctcaggctgattctgtatgtatcgttaacttttattcagacctgcaactgtcttaccacggtcagttgaaagttgttggtatttaccgtgacgcagaactgaaagacatgcttactcttgagtctggtgttaatgctgagaacgtcaagaaagctctggctgctaaaggtattgatttcgtaccaactggcctgtaataacaataataagacattctggagaattttacaatgttgactaattctgaaaaaagcagatttttccttgctgacctgactggtgaagtccagtctatcccaaatacttatgggtatatttccaacttaggtctgttccgttcagcaccaatcacccaaactactttccttatggacttgactgattgggatgttagcttgcttgatgcggtagaccgtgatagccgtaaagcagagactagcgcacctgagcgtgttcgtcaaatcagcttcccaatgatgtatttcaaagaagttgaaagcattactcctgatgagattcagggtgtacgtcagccaggcactgcaaacgaactgactactgaagctgtagtacgtgctaagaagctgatgaagattcgtaccaagttcgatattactcgtgagttcctgtttatgcaagctctgaagggtaaagttgttgatgctcgtggtactctgtatgctgacctgtacaagcagttcgacgttgagaagaaaactgtttacttcgaccttggcaaccctaatgctgacatcgacgcttctattgaagaactgcgtatgcacatggaagacgaagctaagactggcactgtaatcaacggtgaagaaattcacgtagttgttgaccgtgtattcttcagcaaactggttaagcatcctaagattcgtgacgcttatcttgcacagcagactccgctggcttggcaacagattactggttctctgagaactggtggtactgacggcgttcaggctcacatgaacaccttctactacggtggtgttaagtttgtccagtacaacggtaagttcaaagacaagcgtggtaaggttcatactctggtgagcattgatggtgctggtgcagaggttggtgtaggacacgctttccctaacgtttctatgcttggtgaagcaaacaacatcttcgaagtggcttatggtccatgtcctaagatgggttacgcaaatacacttggtcaggaactgtacgtattcgaatatgaaaaagaccgtgacgaaggtattgacttcgaagctcactcttacatgctgccatactgtactcgtcctcagttgctggtagatgttcgtgctgacgctaaagactaatattcttaaggagggttatgaatgtgttatacaggcgacccagccaataaccctcttgatagagtaagaatcctctgcacagacaccaataatgatgaaattcttattgaacagtctgtgctagagtggttctatctagaatctggaaaggatgaaaagaaagcagccatcaaagctcttaaatatttactctttcaagtagccaagatgggagatgagaaggttggtggtgtttatttacgtaactcttccagattcaaatctctgaaagctgtttatgacgaccttgttaaaagctctgtttcaggactaccctatgcaggtggtattaatcagtgtgacattgatatgcgtcgtcagaatccttgctctgtcaagaaatacacagaatatggtgatgctgccagatacgaaggcagagattactgcaaccgtgttaatggcgtatttattatcgagcgagatgaataatggttaaaagggttattcaccccgctagagcaaaattagtcggggctatgaagaacttgcaaacggctaatgctcaagttgggtattttcaagaacaaggtcaacatagctctggtttttcttatcctgctttaatgtatttacaagaagttattggggttccttcagcttctggtaaagtatatcgtaggttgtttgaaatcactatgatgctaaacagacagaccttgttagagcagactaagaagaatctatataagcaacttagcagtctcaacgtagacccctcagataccttagaagcatttgcaaagaatgctcaaaaggcaattaaaagaggttttggtaattctgctatcctccctcctaacgcaccttccacagtcaagaaaaaaggctttaatgcacctcttgttgagacaggtgacttaagggataaccttgcttataaaatttctactaagaagggtattaagaaatgagactcttaaacagacacagctttgtagtaaagcgtaaagtctctgaagacggttattataatgatgatggtgattgggtagcttcacaagatattgtagaggttaactgtaaaggtaatatccagccatatatcaaaggttctgtaaagaatggtacacagattgctttaccggaaggtattagactaaccgatacaagaatcctgtatactacatataaacttagaacttcagatgatgtagagtggaatgagtctgatattgttatgattgatggtcatgagtatgaagtatttatgactatggattggtcacagcaattagcccatacatcccattatgaatatatcattattagaagggataaaatgaatgcagttagaaacagcagaacttgaaaaaggtctagttagaaccttagtggatgttattggtcacagattagctcgtgataaaaataatagaccaaacgtaattagagcttacccttctgataactcaaatgacaaaggtttaaaacctgaccagccatttattaccgtatattgtcaagatgctgcaacaccttatggttgggttcttgataagtttgttgaagatgatgtagtttgttacagaattgcttttcagattcctgtattaattacggtaaatgggaaaggtgctcacagtattatgcttgagcttaaacaacgattagagatgagttcagtcagggatttaattcttgaagagacaggagctacagtgctagacactggagccatcccaaatgactacacttatctcaatacagatttcgaaaattctgcgcctcttgttgtaactcttgtaaaaaattcagtcctgaaagatgaacgcggaagtattattgagcgtgtcattgttgatggcgagttggtttatgaagaaggacaagagccaccagaatatactatccatctagatgtagactccaaaggggtaaaataaatgtggaatccaattgttaatgtagatattacattgaacaccgcaggaactacaagagaaggttttggtttgccactattcttagcttcaacagataactttgaagaaagagtgcgtggttatacttccttaactgaagttgctgaagatttcgatgagaatactgctgcatataaggctgctaaacaactttggagtcagactcctaaagtaactcagctttatattggtagatgcgctatgcagtacactgtatcaattcctgatgaggttactgagagcacggactactcaattactgtagctgtcggtgggggaatgtcacaaccattccagtacacctcacaaggtgaagatactgccgagaatgtattacaacagtttaaaacacagattgaagctgaccaatcaattaaagataaagtttcagtcaatgttactggtagcaacggttctgccacaatggtcatctccaaagctggtgacaatgatttcgtgaaggtaaccactacagcacaaactgtgtctattgcaagcacaactgctgatacagcgtcaactgctctggcagctattgaagcttattctaccgactggtatttcattgcagcagaagacagaactcaacagtttgttttggcaatggcttctgagattcaggctcgtaagaaaatcttcttcacagctaactctgatgtagcagcactgcaaggtacagaattaaatagtgcaaatgatgttccagcacagcttgctaagagtatgtatactcgcacagtttgcttgtggcatcacacagcggcagaagattatccagagatggcatatattgcttatggcgctccatacgatgcagggtcaattgcttggggtaatgctcagttgactggtgtagctgcttctttacagccagctaataagagacctctgacaagcattcagaagtcagctttagatgtacgtcactgtaactttatcgaccttgatggtggtgttccagtggttcgtagagggattacttctggtggggaatggattgatatcgtccgtggtgttgactggttagaatcagacctgaaaacttctctgagagacttgctaattaaccagaagggtggtaagattacttatgatgatactggtattacccgtattcgtcaagtcattgaaacctctctacaaagagcagtcaacagaaacttcctgtcatcttacacagttaatgttcctaaagcctctcaagttgctttggcagacaagaaagctcgtatcctgaaagatgttaccttcgcaggtatcttagcaggggctatcttggatgttgacttgaaaggtacagtggcttacgaataatagaggtaaattggaatggctatgtatcagcaatattcccctaaagacgttgtatgtagctggaatggtattgccattgaaggctttgccccagactcatttttacgtctacagagaacatcaccacttatcacaccagttgtaggtgcaggtggtcaggttgctctgacaagaaatgcagacaagacaggtactattgagattgagctaatgcagacttctctctctaaccagatgctttctgcaattcaagctaaacaagacaacatggaacttgaagaagatatctcttctaacttcgtaatctacgacccatcaggctctgttctggcaactggtattaatgcttggttgcaggaattaccacagattgaacttgggcgtgaccagaactctaaaacttggatttttggttgtgagaagctagactacacttctacaattccagcgtcaagtgtttaataaatcctataagggggagactttaaaaggtcttccccttttttgtttcttttaaaagtattaaggaatcacaatgaaaacagaatctagagtaattaatggtaagaaagtaaatattgttctgcttggggcaagagatgggattaagatgtctatgaagctgggtaaaattgttgttccaacatttgcacagatgctatcaagtctgactgataaagataagaaagaagctccaatggttccatttaaagaccttgttgaagcttgttttgacagaattgaagaaattaaccttgaagaaatggctaccctgttatttcaaggggcaactgttgatgacttcccactcaatattgatacatacttccaagcaaactacggtgagtttattgattacttagcatttgcgctggaggcaaacttcggaagttttttcgaagcaagcattttcaaaagcctaacttctcagtaaacatgggtaatactctacagacaccactaactgatgctgctgtagaggcaacctatgaagaagcagacgagatgaaatttgtgcttgctatttatggtatggaagggtgtaaagaaacacttgaccaactctttgctatgacattctctgatttattatcattgagacaatttcttgaaattcagaggtcgtataaagaggaaattgcttacaacgaacttagaagagcaggaaaaatgtaatggcacaatatacagttgatagcttcattgtggaacttggtttcagtgaaaaggttgttaagggcttgcaaagagttgagaaaatgtctatgcaagctgctcagcgtattgagcgaaatatcaataaagcctttgatgtgaaacctaataaaagttctcaggaagcacttaatagaattgtaaaaaatgctcagtctgcttcgggcagaatcaataaagcactcaacagttccttgaaccttgattcacaaggtgttaaatctcttaagaaacttgaaactcaggcaaaaaagactgcaaaaggtattaacaagtcattaagagatgctatgaaggttgacggtaaaatcactatcaagacagggagagggagaggtggacagagtatccctcctgttggtggtggagcacccagaggtccgagagtagatgttgctcagagacaaatggaaagaatgtttaacaacaacttctattcagggttaacccgtagactggaaacaatcggtggtcaaggtaaccaaatggcagcctctttcagaggaagcttgcaaaatatctataacagatataaaggtactggtaaggttggtgagtatgagatggaagttaaaaagctcatcgacgtaaccaaacgttgggttattgcagaaaatgctagactaaaatcagttaaagaatcagcttggctacaggatagagctaacgcatcattacgtcaattagttggtggatttgtttcagcttatgctttactggaactctcacaaaaaactattgaagctggtgtaaaaagacaatctgcacaattagcctctacagctatctttggagcagacactcagcaagctagaatgttcgctgcatcattcgcacaccaaattggtcagaactacacagataccatgaagcagtactcaaactttgctgctggtgctcaaccaacacttggctttcagggtactcaagagttctataagaatgctgcaatgtttgcccgtatcaggggtgctactgatgaagacttgaaaggtatcatggttgcattccagcagatggcgtcaaaaggtaaagttcaggctgaagaacttcgtggacagttaggtgaccgtttagcaggtgctgtgcagctattcgctgatgctattggtaagaccccacaagaacttgataagatgatgcaagacggtaaacttcttgctcaagacgttcttcctaaagtatctgaaagaatggctgaacttgtcaagcaagcaggtggtatgaatgctgtgtccaagcagactgctacatcaatgggtcaagcgaaggctatgtgggataacacacttgtagcactgtttaacaattctagtgagggcatttcacagttatctaactccgttgcaatgttcttgcaaggttctatgggtagcacgcaggctttaggtcttgtgattgggaacctgttaaaaggcgctagtaatctacttgacttcattacagacttcatgtacagaacatctgcactatactactatgcaagagcttggtataaagaccttgacaacagccagcaaaagcttatcaaaagtgctggtgaatttctaggaacagttgtcacaattggaggcgcagttgctgtagtatcaaaagcagtcaagctcctaagtggtttggttggtggtggtatctttggtaaaatcttacaaagacttggtgttagtgcagcaggtacagcagcagccggagaagcagccgcagcagcaggtggagttacagcaacgagaatggcacttggtactgttggttcagcattaatgctaagaggctctacagacccaaatgctgctaaaaactacagtgaagttacattaccaaaaccatttgaaaatgctgttgcaaatattacaaacccaaaaaggccaatgttctttgatgagaatggtcaacttcagtttgcacagtacactcaagacgttgaaggcaacagaaagttaattgataatggtctatctaattgggagattatcatggagaagctatcaacatctattgataattttgccaataagtttaaccagacaccaatgatgatgacaccttctggtttacctatgcagactaaacaaaccctgaatgttactttcaatcttgatggtaaacaaattgctactaagatggtggatattactgacaagaatcaagaagacattcttctaagttcaagctatccagaggaagaataatgttatgggattctaatatgcaaatcaaatatagtggcaaagacggcatctatttccacttaagagataatgtagatgccttcttaaccttatcagcaactgaaaatatggaatttgacagccctatgcaggtaactacacagaacatgcaatcagggcaaaccgtcacagataatgtgcaaagagcacccagaacaatcactattagtggtgtcgttgtagttggctatgaaggaagcttattattaactcgtcagggtcaattagtagaaaacttcatcgacactcttgaaagctggcgtgaccagaagcaaattatttcagtcatctgtaaagacggaattaaaattgatgattccattatcacaagttttaaagcctctaaagatgttggtatttcaaatggtctaagaatccagctaacttttcaggaaattaactttaaagctatcgtgggacaaactgatatttctgctgcaactggaaagaccgctaccacgaatgatggtggtgctaccagtaaaaagaatacagggaataccacaacaagtctaggtaatgggaaattaaactgtcagttattattcgaccttgatgccaatggagtaagggaacttactagtgctgaagataatgcccttgcaaaatgttccatgtctgcaaaaaccagaaaaggtgttactacattcagtgaagaggctgagaaaaatgccggagcagcattaaacagaactgctggagatggaaaagcattacaaaagcattcagtgaatccgaataaaaaggggacttattaatgtcacaatatattcctgttcctgatacaggatggtctacacaaactgtaactctggatggcactgtctttgtaattgaattaaagtataaagagaggcttgacagatggttcttgacgctatctgatgttgatggtaatgtattattatctgaaaagaaatgccttgcagaccaatcaatcacaggacgctatgtaattccttcattagctggagagctttttgttgaacgaatgtatggtactgatttacagcctaccagaaataacttcggaagagaaaaggcatttgagcttaattattacactcaagaagatatgagattaatggagaacttgtaatgtctgtaaaagatagcactgctggggcttcttttaggtgctatcaattggctgtaggtagtgaaactacagcctttaatgataaacctacaagccatgctaaagattctatgcaaatggactattttgacaacttacaatttacttgtaatgtgtcttatacgtctcagaagaataaagtaacctctgatgataccacttttgaaatctacaaccttaataaagagatgagagccaaattcaaaaccgttggtgcaacagttatgcttagagcaggttacactactggttttaaaagggacgcaaatggcgaccttattattgaatatgataacctcccattaatctatctaggcactattgaatatgcttatacatataagcgtggtgttgatatgattacaaaggttatctgttccaatgataaaatggaaagaaccacgattaagacatcaatttcttataaagcagggacaacgcgtaaaagtgtgattagagatttagtcaacagactaggtttctcacttattgatgaagacctttcaagtattgatagttacacttacaagaatggttttagtgtttggggaagtgttgcagaggcacttacaaaggtttgtgaagaaagtagtctacgttggtatacatttaacaagcaaatccgagtagttccttttaacgctaaggctagacaactttcttgggaaatttacccatataacgttattgattctttgcaaggctactacagaagaactagaaaggttctgaaaaaagagaataagacagttattaaagttaaaactggagttcgttgcaaaatccatttagatgggagaattaagatgggtgataacatcactattagggaaagtgaagattttgaaggtcagtatcgagtaaaaggtctttctcacaatcttgactttactggtggtgcttggacaactgaactagatttagagaaggtggaataatgaagtcaccagttactagaatgtctgggtatgtttcagaatgtcttgatgaatttagaaaagaactgtatactggattaccagccattattcagtctttcgattcaaagactcaaacagccactgttaagccactttactctattaacggtttacctatgccagagattactggtgtacctgttcaatttccaagtggtggtggggcatctttaacattccccgtaaaaactaatgacagatgctggttagctttctcaatgttacctttagatgacttcgttgtcaatgacaagaatgttcagatggaaacaaacatgagaaggacacatgatatttcagactgtgtagctttcgtaggcatctgcacaagaacacagaattttaaaccagacccaacagcagttagacttcatttcggtgactctgtgttaagagttactgatgatggtaacttctactttgaaggtgatgtacacatttctaaaaacttgtacgtaacagaagaagtacacggctcagattttatcagtgacacgactggtgtgagctttaatgaacacacgcaccattattactggacagaccctgctggtgaggctgatactacagaggcacaataatgaaaacagactttgcattaaatctaggtggtgactatgttgccactttaggttcagattcagtgtatgtggctcatggagatttaaagattactggtaaccaaattagaattatcccagaagatgataaagctactcaggttgctcaaagacttcatattagatgccttttaagggctggtgaagttttctttaatacatctgctgggttcccatatttacaacttgccaaatttaaacagaaaacttctatctttgataattacatgaaagcctaccttgttgaaacaagagatgtatctaacatctataactattcttcttcaatggataatgctcagagaaaagtaactgttaattttgatgcaactactacaacagatattttaacagacattacgcaagaggttaatatctaatggcaggattaactacaacaggattacaaactctaagatatcaggaaatttttgataatatcaaatcaaggcttcttagagatatttcaccaaaccttgacgtttctgaggatagtcagttaggtctctttctagcttcaattgcaaggtctttagcagacactcatgaaattctatcagaaatctatgatggtggaacgattgataaagctgaaggttttaaccttgatgatattacagctttaaacgctgtgtatagatatgttgctcaagctacaaggggtcaagtagagtttactggaacaacaggtgcaacaattccgtctacaaccagattaagaagtactgctgggaatatcttctatccagtttcaaacattacattaaccccttcatactgtgttgaggctattcttgaagttaactctttacgaactgatgcaaattatgttattattattgataacgttattttctcttatcagccaaaatcttcagacacaatcacagtactattaactgagcttgctaatgcaattaatggtggtattgtagcaaaagctgaagtcatcaatgatggttcagcattacgagtttataaagatgaaggcgacattattgcaagaaccaaccctatggtagtgactgctaccacattcctcacattcacaaaaattacaactatccatgatgttgttgctgaggaagttggtgcaattcctgcattagctgggacacttatcgaaattgaaacaactgtagatggtcttgatagcgtatataaccgttatggcctgacaacaggtagaaatgaagagaccgatacagaacttcgtcagagatatttagaatccctgtcagttactggtgtaggtactctggatgcaatcgtagctgctgttaagagggttcagggcgtatcagatgcttcaggtgttgaaaatgatactgaagagacaagctcagaaggactcccaccaaaatctttcaagattgttgtagttggtggtcaaaatgataatgttgctcaagcaatctgggacactaaacctgctggtattagagcttatggggctatctttgggacagcttatgacttaggtggactatctcataatatttacttcagtaggccaacacctaagtatgcttttgtaaaagtatcatactctctatataatgaagaaagcttgacaattccagaagaagatatcagagacagtattattcaaggtattaacgcttatggtagaactttgaaagttggtaatgatgttatccctaatagaatctatgggtatatttataatgtcattaaaggtatcgagattaatgaaatcaaagtagcactatccaatagccagtcagtaccacctagtgatggacagtacactacagcaagaattactgttgatggtgaccaatacactgtatgggaaagtagcaagtacaccattactaaggagtgataatgtttcagaaaattgatgatgtttattacaagactcttgatgaaaggactgttacacagtttaaagagaaattcatctatacgagtttgctgaaagctatcactgatgagctacaaacattggaagatgtttcatggcagatgcacactgaaaggaatatcaggaaggctattggacagcaacttgacaacatcggtgcattaattaaagtaccacgaccacttggtgctgatgatgaaacatatagagcaattctttatattcagatttttctaagacgttctgatacaaccccaacatttttacagaatgctatcatgactctgtatgatgcaacattttcacagctttttgaacatattacacctatgactgctggtattgtggttagagttaacacaagaaataacgttgttgacacagcatacacattagcaaaaattgctgcaacaactattggttcagcagtcattctaagagatgtaaccctgaatggtactgcttggacacctgtagaggttgctgactctgctttagcaattgttgatgataaagataactggcttgttacagatgctaacaagggtctggttaccaacaatacaggaggttctttagagaagaacttactagggagtttagcagatgctggtgtaagagatgcttatttcaagattgatagaacggctaatagtggctcagtagattacttgaaggttaataaaaattataatgctacagacaactacatcgttggtaaagaaactgtagcaggtggtgattatggtgttatggctgaagtagctcaaatcatcaaaggtagaaaagataaatcacagcaagaaggaagttcttaatggcatttttaaattggtctacagatgaagtagatgctgatggtaaccagctaaaagtattaccaccaccagaaattcaggcgactggtttattaagaggtgaaccaatgggtcgccaatggtttaattatatcttaaactatctcctgaagaaagcaaatggtactgttggtgaggtaaggtcttttgccactgcgcaaccagatttggtggctaatggctggaagcttattaagaccgaaacaggtactgcatcaacaagtacaaaaaatctttatacttatgaatttgtaggagcttaataatggcagtaggtgaaattcaaattagtgccttgcctcaagcatccttaccaattgaccttagtgatatcttccatcttaagcagggtattgaggataagaggtgtactcttgagcaattacttgctccacacgcaagcctaagaaataaccctcatggtgttactaaaacacaaattggtttagataatgttattaatgctcttcagttagtcgctgcaaataacttatcagatattgttaatgtagctgaggcaagagcaaatctacagattatgtcttcagaagaggttaataaccttgtccagcaacatatcaaggacaagagtaacccacacaatacaactaaggcacaggttggtttaagtaatgttcagaactggacaacatctaatctgtataacgaagatgcagataagtatgctacagcaagagcagtaaataacttgtacaaggctgttcaggcttcttatccagtaggtactatccatctttctatgaactctgcaaacccttccacatacttaatttgtggaggtacttgggagttagtttcaaaaggcagggcattggttggctatgactctgatacaagaccagcaggttctgtatttggcgcttcaactgtcactttgtcagttaataacatgcctcagcactcccactctgtgtctcttagcggtggtggtcacactcataatgcaactgtgtcaatttcagcttttgattatgggactaagactacaaactcttttgactatgggacaaaagctactaacacaactggtaaccatacacacagtgtgtcaggtaacactagcaccaatggtactcacaaccatgatgtgtatcctagagaaaatgatggcactggtaatgctgtggctgactctgatggtggtggtgcaagaaggacatcaaggacttctagtgatggtgcgcactcacacagctttaacgtcacatctggtgcatcaggtgaccacagccacacggttggtattggtgctcacagtcatacagttggtattggttcacatacgcatagtggcactgtaacagtttcttcttctgaacatacacatagtggcaatacaaatagtgttggtggaggtcaggcagttaatattgaacagccatccttcgtactgtatgtatggcagagaacagcttaatttctttacaggggctttatagccccttttaagaggaaaatttataatggcagattacaaattgagtgagctaaactcaatcgacacaatccgttcagatgaccttcttcatgtcagagttaaaaagagacctaaaatgctgggtgatgaagaccgtcgaatgacctatcaagatttcttagcatcttttaagcttgaaagatttgttcagattgctggtagcactatgacgggtgacttaggaattgttaagctactttacggtggcaaggctgtattcgaccccacaggctcttctgagattactgttggtgatgttttaaagacttttaaaatcaacgcaaacggccttaaactaactattgcagacgcttcaaggtcggcaactgtttatcatactttgaataagccaagccctaatgaacttgggatgagaactaatgaagagaatgacgcaaggtatgcaagactagccgtgaataatacctttagaggtactcaagctatcctctctgacaatgaagcgctcattattaaaaatatcactcaaggtgctccactctatcttcgtggtcaagatgcagatggtactaacagatggtatctaggtaatgataataggggtacaaataatcttgtattgaagaatgtaaagtctgacgtttcaattgctattttagagaatttggtgacagtcaacaaaacagtcagaatcactggacaggtgcaaccttctgattggactaatattgattctcgatacattccagcagctactttgagtaatcttgctaaactaagtgatgtaaacactttcaggtctgcacagattattaatcaaaatggcttattgttacagctaaagaatactacacaagatagccagttatactttgctggctttaatgctgataatgttagaaggtggtacatcggtaacggggaacaaaaaccagaaagtttcgttatccacaatgataggactgctactaccattttcatggtgaatgacttcttactgaacaaaacagtcagaatcactggacaggtgcaaccttctgacttctctaacttagatgctagatactatacccaatctgccgcaaacgcaagatatatgcttgcaagcatcactggttcggcttctgaagcagatggtggtgatggtgttgcatgggatgcaaaaacaggtctttataaggttactaacaccactggacagtcttcttcacttgtatatcacatgtttttagggactggttctacaccatctgcacaattaaagttttcgtttaaaaatggtgggatgtggtatagaacatcaagagatgcctatggcttcgaagttaattggtctaaagtttacacggaagcacaaaaaccaaccccttcagagattggtgcatacactaaagctgaaactgaccagaaaattgcaacagcaattagtgactctacagaccttaataaaatctatccagtaggtattgtaacgtggtttaacagtaatgttgaccctaatacagcacttcctgggttaacttggacgtacctgaacaatggtgttggtagaactatcagaattgcagcagcaaacggttcagatgttgctacaactggtggttcagattctgtgacgttgtctgttggtaacttgccatcacacactcatagtttctctgctaccacttcatcttttgattatggtacgaagggaactaacagtactggtggtcattctcactctgtaagtggtacaacaagtgctgctggcaaccacgctcaccacttaggtctgttattagttaatggtggtgatgctcagtatggttacacaactgttagcaacagcaagacaagaactcttgactggcttgatagaagagataacaagttccctaacactaacacaactggtaaccatacacacacgtggtctggtactacaagcggtgctggtgaccattcccactctgtaggtattggtgctcatagccacacagttagtggtaacactggtagcacaggttctggttcggcatttagtgttactaaccagttctacaagttaatggcttgggtaagaactgcttaatcccttgtatgggtaaaggaagcagtaaggggcataccccgcgcgaagcgaaggacaacctgaagtccacgcagttgctgagtgtgatcgatgccatcagcgaagggccgattgaaggtccggtggatggcttaaaaagcgtgctgctgaacagtacgccggtgctggacactgaggggaataccaacatatccggtgtcacggtggtgttccgggctggtgagcaggagcagactccgccggagggatttgaatcctccggctccgagacggtgctgggtacggaagtgaaatatgacacgccgatcacccgcaccattacgtctgcaaacatcgaccgtctgcgctttaccttcggtgtacaggcactggtggaaaccacctcaaagggtgacaggaatccgtcggaagtccgcctgctggttcagatacaacgtaacggtggctgggtgacggaaaaagacatcaccattaagggcaaaaccacctcgcagtatctggcctcggtggtgatgggtaacctgccgccgcgcccgtttaatatccggatgcgcaggatgacgccggacagcaccacagaccagctgcagaacaaaacgctctggtcgtcatacactgaaatcatcgatgtgaaacagtgctacccgaacacggcactggtcggcgtgcaggtggactcggagcagttcggcagccagcaggtgagccgtaattatcatctgcgcgggcgtattctgcaggtgccgtcgaactataacccgcagacgcggcaatacagcggtatctgggacggaacgtttaaaccggcatacagcaacaacatggcctggtgtctgtgggatatgctgacccatccgcgctacggcatggggaaacgtcttggtgcggcggatgtggataaatgggcgctgtatgtcatcggccagtactgcgaccagtcagtgccggacggctttggcggcacggagccgcgcatcacctgtaatgcgtacctgaccacacagcgtaaggcgtgggatgtgctcagcgatttctgctcggcgatgcgctgtatgccggtatggaacgggcagacgctgacgttcgtgcaggaccgaccgtcggataagacgtggacctataaccgcagtaatgtggtgatgccggatgatggcgcgccgttccgctacagcttcagcgccctgaaggaccgccataatgccgttgaggtgaactggattgacccgaacaacggctgggagacggcgacagagcttgttgaagatacgcaggccattgcccgttacggtcgtaatgttacgaagatggatgcctttggctgtaccagccgggggcaggcacaccgcgccgggctgtggctgattaaaacagaactgctggaaacgcagaccgtggatttcagcgtcggcgcagaagggcttcgccatgtaccgggcgatgttattgaaatctgcgatgatgactatgccggtatcagcaccggtggtcgtgtgctggcggtgaacagccagacccggacgctgacgctcgaccgtgaaatcacgctgccatcctccggtaccgcgctgataagcctggttgacggaagtggcaatccggtcagcgtggaggttcagtccgtcaccgacggcgtgaaggtaaaagtgagccgtgttcctgacggtgttgctgaatacagcgtatgggagctgaagctgccgacgctgcgccagcgactgttccgctgcgtgagtatccgtgagaacgacgacggcacgtatgccatcaccgccgtgcagcatgtgccggaaaaagaggccatcgtggataacggggcgcactttgacggcgaacagagtggcacggtgaatggtgtcacgccgccagcggtgcagcacctgaccgcagaagtcactgcagacagcggggaatatcaggtgctggcgcgatgggacacaccgaaggtggtgaagggcgtgagtttcctgctccgtctgaccgtaacagcggacgacggcagtgagcggctggtcagcacggcccggacgacggaaaccacataccgcttcacgcaactggcgctggggaactacaggctgacagtccgggcggtaaatgcgtgggggcagcagggcgatccggcgtcggtatcgttccggattgccgcaccggcagcaccgtcgaggattgagctgacgccgggctattttcagataaccgccacgccgcatcttgccgtttatgacccgacggtacagtttgagttctggttctcggaaaagcagattgcggatatcagacaggttgaaaccagcacgcgttatcttggtacggcgctgtactggatagccgccagtatcaatatcaaaccgggccatgattattacttttatatccgcagtgtgaacaccgttggcaaatcggcattcgtggaggccgtcggtcgggcgagcgatgatgcggaaggttacctggattttttcaaaggcaagataaccgaatcccatctcggcaaggagctgctggaaaaagtcgagctgacggaggataacgccagcagactggaggagttttcgaaagagtggaaggatgccagtgataagtggaatgccatgtgggctgtcaaaattgagcagaccaaagacggcaaacattatgtcgcgggtattggcctcagcatggaggacacggaggaaggcaaactgagccagtttctggttgccgccaatcgtatcgcatttattgacccggcaaacgggaatgaaacgccgatgtttgtggcgcagggcaaccagatattcatgaacgacgtgttcctgaagcgcctgacggcccccaccattaccagcggcggcaatcctccggccttttccctgacaccggacggaaagctgaccgctaaaaatgcggatatcagtggcagtgtgaatgcgaactccgggacgctcagtaatgtgacgatagctgaaaactgtacgataaacggtacgctgagggcggaaaaaatcgtcggggacattgtaaaggcggcgagcgcggcttttccgcgccagcgtgaaagcagtgtggactggccgtcaggtacccgtactgtcaccgtgaccgatgaccatccttttgatcgccagatagtggtgcttccgctgacgtttcgcggaagtaagcgtactgtcagcggcaggacaacgtattcgatgtgttatctgaaagtactgatgaacggtgcggtgatttatgatggcgcggcgaacgaggcggtacaggtgttctcccgtattgttgacatgccagcgggtcggggaaacgtgatcctgacgttcacgcttacgtccacacggcattcggcagatattccgccgtatacgtttgccagcgatgtgcaggttatggtgattaagaaacaggcgctgggcatcagcgtggtctgatgactgattgttaagatggtgttaatattctttatgggtattctcaccatcttggctgatgaggtgattaaatgcctacaatcctagcaattcttctaaaaaatctaggtagcttcttctggaaactcattttatcccttctaagtgaatacatgattgagaaagtgttctttaagcttgcaagataccttgcgagtaaaacagacacacctattgatgatgagttcgtagataacttagaaaaagcttttaagggggagaaataaatgaagtggctagaggaagcttttaaaaataatattggtgcaattgtagttggtatttttagtgttattgggatgtttaccacgatgcaggtttcaagtggtaaacaagaagtgtctgtcacaacaaagttacagcagctagataattattccaaaagtaactattcagctattcgtgatttacagtctgacatgagactgattcagctagggatggagaaccagaaagttcagttagagaacgttaagggtgagaatgcaaaacttaccaaaactcttgataaattctctgacagtgtgaataatctggctcaatcagtatcagccttgcaagctattactgaaaagaacacaaagaatactgaaaaataaagtttaaggctcctttttacgggagccttttttgttttacttgcctactgacagaggtgcttcaatcttccctgcatgttggtagttgttaattccaccaataaagtcacttgcagtaagatgttttaagtcacttaaagtgttaagctgtacaccaatctcaaaagtaggtgcatggaactcttcattgttcatcagttcataaacctgcttcatatggttctgataaatctgagtatctccaaagacacctatcaagtaccgtggagtgtatccagtcatcttacaaagaacttccagaataaaaccataagacgcaatattaaatggaagccctaaaaaggtgtctacagaacgctgataccattgcaagtcaacttcaccttcgttggtgatataaatctgaaacagaacatgacaaggtgctaaagccattgagtttgctgcaatatctgctgcattccaagcattaacaagcatgtaacggtctgtgatatcacctttcatcttcgttactaaggtttctaactggtctacaacacaaccattatgaccttcaaagcttctccactgaaccccgtagattctcccacctgcatcttctaaccagtcttgctcagaagaatagttagagcttaaccaacgtttaaaatcatctgaccagatagtccaacgttctccatcattttcaccccaagtgcgataacggagttcaccaagtttattctcaccattcaggaaccataaagcttccccaatgacttgccgtgtaaacacctgtttagatgttaagagcgggaaaccagttcgcatatcaaaacgaaactgaggtggagcaaatgcagagataacatctccagttcgtgtagtacgcagttcaccaacggataaaacatggttcaggatatttttgtaacttgaatctgcttgtgacatatcaaaagtgtccttttacttgtggaacataaatttcaaaagttgctttaccatcctctgatggttttgactgtacctttgtaaatacacggttatcatacagcttctcaaagaagttttcaaaaggtaaatgcacagtggcctcttcagtaactttatggaagactgtatggaacaccacaccagcatacggtaaagcattgacaaggacacctgcaccaccaattacaaagacatcttcatcaatagagctatcaagatacttcaaaaatgctccaaatgactctttactggctttagcatacattacatcatctttgccaaagtctatgcctaagtatggtacagaatttgttaagattaggcttgcacgttctggtagaggtttactacccagagtcttaaaagtctcattacccatgactactaagttatttttagtgagtctcttaaactcttgcatgtcctgtttatgtcgaggccacggcataccagttggagtaccaaactcaccattttcaccacttgcaaagattaatttaatcattttgtaaatcctttcttaatgaaccagttgataacactcttcacaactttactacgatggtagataaaatgtggagagggttggtatgaaccataagcccagaaagcgataatttcattacaccctgtgcatcgggtactttcttcagcaatatgaccgttgactatttcacttacctcaccttgtaagtctgtacacccgcaatgtggacaacggataggtgttccatcagactcatagcagtgttcaattttcatctatttaacctcaaaaactggttcaagaaccaatataaagtctacacagtcatcttcttcatccagaataccatcaaagttcttaggtacaaagtcgaagaggctcatagaatatcggtcagaagtaaccctgatagtgttccctatattctctacagttaatattgtacggctttctgttacctcacttagaagattactcacaaagtcatctaagaagtgtttcatcagtgacttgaagcctttagggtaatctgtaccagagtatgtttcaatctgaggaacaagcttaacatttatactagtctttgttaagaacgttttagagaacatgctatcaggtagcttacaaacagtctttccagtaccttcatgttcaatctcaacaaaaccagcttcatcgccacatgtaactattttaaaagatgcttcattctcatactgtgaagccataaactttttaagcatcgttttaaggaaatctgcatgggcatcttgtaagaatatatcaatcatagttaatcacctattatgggaacagacacttgatgtcatcgtttttgaaaacaaaacttgtgtagttatgaccatcaacatccagccaaacagcctgaacatctacaccatcaagattgtggtaaagctctttgatgaagtggtctttcacaatctgactgctagttgtttccagcttaatgttcgagattgctgaacctacagccatatagcccatgacacgtttcttctcagtatgcttaatcttaccatctttgtaagccataatgagattggagagaatcttcacaccataatatttttcaaggtgagtaggtacgccataaaagcctaatgcgaagttttcagagtggataatgttttcacgtttcatattaatctgccaaccttaaattgaaattaacaccaaatttttcacatacttccaacatatactcaagggagacgttaccagtgagatggattatgttggatacacgagcctgagagataccacaaattttagcaacttgctcttgagaaagacctctggatttaatctctctcttaaaacgatgtgcaacgaagtctctcatttcgtctacatccattggacaaatataactctccatttcagcctctctatcagcctcccaatcatcttgtggggcataagggtcaaaaacctcattcatctttcttcttccgtttgcgtgaagtgtcaattaatgagtctatgtttgtagccctaaccttttcacgttcatcgttaagataatcgtcaagagccttttcaatctgtgaatcatcttgacagataactgtaaagactgtaaagccgtctgtatcgtcaattatcttaccataaccgcttctgggatgtaactttttaagagccatatcaaatacctgtgcagcttctgttttctaagaaatactcaacaccatacatagctttttgcatcaaatcttctttaaactggatacgatgattgagcatagcctgtacatcaatatcatcagggtgcttctctttaatatttgcagattgcaggaaatactctgcaagaacacgatactgatagtcagttaccttatcagtcatctctgttaaagactcttcagagattggtttaagtagttcacctttagatagggcaacacctttaacaatctgacaagtgtcttctggaacacctgataagtccacatttggaagttctgttgcattgactggtaaattcattgccataaccattgcagcagctaataaaatctttttcataatgacctcaaagttatattgaattttgtattacatttagtataaaaataagctataacacctgacttgtcaacagattttatagcttattttggcagattttttataaggctactgccatccttccataccttaccttaccacacctaaccatacctaaccaaactacaccatacaataccttgttaaaagaccctcttaaagaccttttaaaaaggagcctccgaagaggctacctagtcaacttagaaaggttttctgcgttgcttgttaatgttagctttcatagcagctaagtggttttgctgttcaattagtcgtgaacgttcttggtggctaagtgccatagtgttcacattctcaattgcttgagtagcttgctttaaagcacgaccaattttaccagacattttacgttttgcaatagttgcttgatgcttaggttcaaccacacgataaccaacacccattgaagcaaccagataaatcttctcttctttaagaagcttctcaataaacttctcaagtcggtttagacgtgtaagagcataagccttcatttcatcttcgtacttaacaatgtcaccttgataagttggcttcacaatacctaagaaggtgtccatctcagagtgtgatacagtgtcaccataactaaactttgctgctaatgcttttgtattcataattaaacgttaccttctgaaataacttctacagaaaaacgaccaaagcgtggacgccaatcacctacaccacaaaggttgccagcattttccagaaccatcaggagttcttctttggtgatttgctcttcatcgaacatcaaaccaaactctacagaccagtcacggaagattggacggtagctcataactcgtgctgtgccaatcttaacagatttagcatagataaagtctggattcttagcaagttcttgtgggtttgctgggcagttcttgatagtcattgggaagactacatctgtcagcataatggctcggtcaatcaccttaccaagtttgttgagttttgcaccagacttgatacaagcctcaatcatctcaccgttcataacaaaacctagctgctcatcgtagtaacaagaggttaccagttgactttctgctaagagcgcatagtcttcgtcagtctttttacgtttactagacagagacttgtgatattttgtcagagggtttaatgggtctgacagtgtatcagcgtggctcaggaaagggcgagtaccagtgattttgatatttaacagtttcatagcatttagctccacactttagttgattgttaagttgtttgtaaagaaccctcaacagaagactctttagaaacttggtagatttttaacgtggctactaccatccacccataccttacctaaccaaaccgaacctcacacaaccagaccgagccgcaccccgccttattaaaagaccctcttcaaagaccttttaaaaaggtaagtctcattttaatgtagctgagactaactacccatactgtaccgcacctgacccgacctgaccagaccagacctaacattaccgtgccacaccgtaccgaacagaacactgccatacctcacatcacttaaaaaccctcttagaagactcttaagtgatgctggtgagtacccgttggtttatgctgctcagtatactcaccaaattttctatgtcaacaactttttatataaaagtcctgatagctatatgtgttacaaaacagaagattgtgaacaaaacacccattgcaaaagatgtgtccaaaagcttacttgcaatgtatgacaatacaaagacaaccagtataaacagaatgactgcactgaacatagtttactcataatccctaatagctagcccgacagggaactgtaaagaacccttacgagtcatcttctggaactgaaccgttaaaggcttcccgataaactcttcaggatgctcagcaagatactgtttcttctcatgagtagtcttccatgagacatctacaaagacgttaggaagagtctctacaacgaacttgccatgaccacgcttatcagtctttacaccagtcactttaaactcttcagtgtgcatcttcttgtgcttaatcaagaagtatgaacggtgacaacactcatagaaggagtcttcagagattgaacggtacattgcaccttcaaacttagcttcaacccacttatcgtgagcttcatcaaactcttcccaagaatttacacgacgagacttaacaggaacaactttacagccgtctctaaagtcattcaatggtgaagtctcaataatatctctacgctcaggccacgtcttagtactgtcacagatatcgtaccagtaaaacttgagcaagtgtctgtcaggattgtcttcatttttaatcatggagacgatatcttctaagtcccacccatgagcataaatctctccatcaaattcatcaacatctttgtggagccttaacattgccataatgtcaggtattagttcagtagggattttgtaaacagtattctcacgagaatatgctgtaaatacactgccaatactcaagtgccttgaaatcctacaacggacaccatcaagtttcggttgagcatcagcagggaacttcagatactttgcatggctaacctttgcagcatcatgagcaagctgtacacctaccttctcagtattctgtgcagaatcttttgtgtaagcataacctttgcggtcaacttgctttttatacttagcagcaacttcaaagagagcttgctgttcagcattacgctcattctttttaccgatgttcttaggctctgctgtgtactcttcaaacatcatcttgccattttctttaccataggttgtgataactttgtcacctacagcaacacatgaccagacgttgaaggaaccatctttattttgtttgtacagaattgtcatttttaacctctgagtgataccaagtgttgcaggcattacatgcgtaaagctctaagtcgtttttatctggtttatggaaacagtttgacccacaacgacaccggaataacttaccatcaacacgaagaatgaatgtttcaagctcaccatcttctgtaagaactgcgttctgaaatttattatctttacccatttgtactctcgcctgtgtcagattttatataagacctctcactacgtcttttaatgaaatgtacaacgcattttggtgtattttttacatctttaatgtgcaacctttcgaaactgtgtactgtgaagattgcatctgtcattgtttgcttagatttcattttctcttaccaccaatttccacgtcgataacttgaacatcaccagcaacatcaaacttatgaatgatgctttccacagtgtaagtccaaccctcaatgcgaaccaattcaccttctcgcggtacgattgggttacgttgggccacggttgcagtggaataaacaacatcgtagcagtagatatagtgtactaaaacttgcatattagtctcatccatcaataacagtagtgtgtgattgaccatttttgccatatctataagatgttgttgtttgagagtttgggcatctgacaacaacaatatccctgcttatagcatccccattgagtttgtagattttgcagtcttgcatctctggagggaggctgtaagaggcatctttgttttcataagatgggttacagccagccagaaaaattactccaagtgcaaccattgctttcacacaactcttaaccttattgttcacgataatctacctctctgtatgtttttaaatagtgagtgatgagttctggtaattcactacgtttaacgtttgaacgaagaagtgtccagtcaaaacctttaccaaccctcccccagagactgtacattttcttcatagcaactccagaatatcaatacgttcacctttgagtactccagtacggtcttttgcaatcttcccttcaacaataagaatgtgtgcagaccttaaagtgtcactgttaaaggcttttacgaacttgctaggcatcactacaatacacatctcctgaatcaactctggagtatagcagttgtcgtgaagttgctgaataacgtctgcaagtgtcatttttgatgcctccaatactcaatatcaataagttcttgtgcaatgcttttaaggttacctttcaagaaaaccttctcagaacctgaaagagatgaattgtcaattaacctgttcatcctctcaaacaacttctgcttacgattcttgatagtctcttttgaagcacctttcatcatcgctgcatgggttcttccacggtggctcataagccctcctatataagatatagtataaggtactcttccatgagcaccttgtcaacttagttttgcaaactctccgtggagtttaatagcagcttcacagtaagctttatgggcttcttcaggtgtgtcaaacataccaagatgatagtttttaccttgtaaacgtatcattgctcgaaaccttttacttatcttctgtacaccttttggcaacccagatggggactctcttgaccgattgcaagagttttgtgaagctgtacaaacccttaaattcaagtacctattgtcccaaccgtctccattcttatggtcaacctgtaaggttttatcaggtagatatccatccatatacaagataactaaacgatttgcttggtaaccccttccatcaatcagcaactgaactgacttgtgtccatcagtatttgttctgtagtttccagccctcttacctccaaatctagagttaaagtttgcattaccttctctaaacttccaagtaaagacccctgtttcggggtcgtagtccaatagctccttaagacgaatttctgtaatcatttcaacaccatcaatgtacttccaaccagctcttaccaaccttgcctgtgccagttacaagcgtctcactcttcaaacctaaattcttagatgcctgaccatacatccagtcagttatggctttaacttcttgagtcatactttctgggcattcccaactgttttcatcgtggtatgccagcaaaagcctagcaccaattgctggttttcgtccatttaattttgtcaacccttcttcacatgctcttctacaagcaaggttaattgcctcattttgaatctgagcctctgaacccatgagcaaataattcaacagcttatgcggagatttacaccacaaccaagctccagcaacctttacaaaaccccctttagagattgcagcagtcttaccaaacacctcttcaagtgcctttttagttgctttgtagtcagcttccaagtcatctagcagctttttaattttaggcaaacgaataaagtaagtctgtttagtcagcgcaccttcctgagtagttgcagctttaatcgtcttagcaaacttctcatcacctgcaccgaacagcagtgcatagataccattcttagctttcttacgacccttgctaatctcatgaagaagattctcatcctgagtagctcgacaagtcaagatgtcctgctcatcgttcaagttaaagtaaatactgttcagtgtatgtgcatcagtccctgaatagacaacgtacaggtcattctcagagtcatagcgaaggtacttatcaatctctgggttgaggtactcatcaaagtgtttacagtaatagcgtccatcttcttgacgaatgaactcaatttcttctttaccttgcgttaccgctttggtgaagtctttatcacccataaagttacaaagaagaactagctgggctgagttcatgtctacagagacaacgttagtaccttcctcacaaatccacactgccctcattggttccccatagacagcagcaccagacggtacgtttacaataccatactgtgtcatacgtccagttgaagtaccaaacaccattgcaccagcactaaggcgaccatcaggacgaatctggttcaaccaacctttttcatcatcctttgagttctcaatagttctgcgtcggtgcatcaaagtgtagtatttagcaatcttctgtccaagctcaccttcaatcgtatcgtaagatgattcagtaagttttggtgaagtacggattaagcaaggctcaagcaaatctgtgtacttcttcacagaccagttatgctcaatgtactggacgccttcgtgttcaacataactcaaaccacaccgctcaaccatttcctgccacttaggatgctttgtaatcatctttttattgtctttgaaacgacaaactttgacagggcgaccatcagagtctttcttgtagttccagtcatctggaatccaaccaactgatttcaagtagtctttaacaactgctacctgagtcatacgagaaacttcaaactcaattggtgtatatggtgcatcaatcaaacctgtatagcgacttgactcaagttcaaagtggttaacaacatgactgttgtagtacttcacagttttgactgtttttactggcttccagtctttgcatttcttaccaatctttgcattcaactcgttgcaaattgcacgagcatccttcattgctacaaaaccttccttgtactcttcaccagttacagagttggttggtgtatagcaatttctcttttcaatgttaaaaatctttgtagttggcttaccaaatggcttgatttcatatgtctgcatctcaccgttacgtacctgctgacggtactttgtcttagggtacttggtaattctcttcagtccatctgcatgaccaaatgtttcaacatactcattccaagcttttgcaaactcttctccagtgactttacctttggtcttaatagttggaggtagatgcggttcaacctctgaagcaagctcattagtcaacttgtcaagttcctttacatggaactccataagctctttatcagctttccaaccattgatagcttgttgactcatccagaaagatgtttctttagctcgcatgtaggtttcataagtgtctatgccacacttcttaagcttgagatactcattatcaagtgcccgtttagttttggcgttaatacggatatcttctacaacacgagtgaagatttctgcattccacacaccccaatgttcaatctctggtttacgaacaccaacacgagcaccccatgcagccaagccatgagcacctttataaccctttggagttggtctatccatccactgaacacgagactggataagagaatcctgaaagaaattactccacggcttacactttggattatcaaagttccataaatccggtgcaatgtgattgaaaacccaccagtcataacctagaccattatgaatgcaaagacgttttgcctttaacgcaaactcaataccttcacgtaagccacccttaatgtacttggtatacttgtgaccgaggataggttcatctgtaaagacccatacaggaggctcttcatcatcagatttatagtctgcaaaagccattacgtgaactttagtgaactcaaggagtaaaccatcagtttctgtatcaccaaccaaatgtaagtttttaaaatctacgttttccatttttactccctctaaaatcattaacctcatacattactgcaaaaaattataaaaagcaagttgacaatgcacttgacaaggtgttaatctttgcgaagtgggtttttacttaaaaggttacttaacagtttaactatacagatactttaaaagtcttaaaagattatttaatagcttttaaaaagctttaaagtataacgtatagaatacgttaagataaaagattaaaacttaatagttacttaaaagaggcttacatgcagaaaatgtttgttcacccagacatagctgactttgttagagctttgcaaaagttggaagaacttgacattgctgctcaacgggaatatgctcaccatcacaggagaatggttgatatacaacatgaaatagagttgtctgaaaactatgaagatgacttaaaatgctctgtatttgagcatatgaaagatgttgctacagcgagacgtaaagctaaagacacagttgctttactagattctcttaaaaagaggttgcaaagtggtacagacctgtgtaatctagcgtcactgattaacgatgttgaaacttcttgggataggcactattatccacgttctgaaaagacacttgacttttcttcatccgaaaacttaaaatgttctagaaagaaacttaaccaactgagagagaaataatatgaatatcgatgtagaaaagatgcttgaagagaaaggtattgacgaagcatttttaatcaatgccgtagaaagcatggctatgattcttcgtggtaacaactacacagaacagtttatgcctgcaagctataacttgcctgaagacaagtctgataacggtgcttttgcagaacaggttaacatgatgctttgcgacaaaacacttgctttagcatctatcgttgtaggtgttgatgcccttgcagagttcattttttatgagatgcagaaaaatgattatattgccatgaccactgaagaaaaagacttgctactactcgcaggtaacgatgaactaattgacctgttaatttcatcaactagtgctgttatggctgctcttgagaagcgcatggaagaaaaactttcacgatatgaaaaacttgattggggtgtagaagaattaaacccacgaatcaaagaaattatccagcaaactaaagagtctttggaagaagctgttgaaaatgactctgtagctgatatagaacctcttcaggtgaaagttgcactgatgattccagctatctctacgatgatgaatatcgttgcactaatccaactttcacagatgatgggtgtaagtattgagttcattgaagagatgactggtggcgttagtatgcaagcaatcaatgatgttttggtgaacattggtgcttcaatcattgaagagaaactacgcattaacttcggtgatgattttgtgaagcaaatctcagctatggctgaaaaagagtatgctgagcaactgcactaagtctttataaatcttacaagcctccttagttgggggctttttagtaattaatggagataaaatgagtaatattatcgcatttactggaaaggcacgttctggaaaagacacctcatgttctattgtgaagaacatcttagaggatgagcacggctacaatgttgctgtaatggcctttgcagacaaccttaaactgtctgcatcaaagatatttgacctgacttggaatgacctgtatggtgaaactaaagagactccacaggtatttgacttgtcatatcctgaactgatgtttaaagttacggaagctatggagttcaccttcagagatgaacgttaccatatggacttcaagcttatgtcagagttaaccggacgattaatcatggagcttaagaaggttgctaaaccaactctattgacacgtctggggtttagcaaaaagtataaattctcatcaagacaaattcaacagatttggggcactgaagttgtccgtaaagtaatgggagacaagttctggtctaaagaccttgaaaaaagaatggttagattctatgaaagttgctcacttagaaatcaatatggttttgtcttaatcagtgatttaagatttgactctgaagctgagtggctgagtagatttgcacaccaaactattgaagtaaaaagagacaatgtggataagatttcatcacacgtttcagaaaatgggctatccaccaaatatgagcgtgacattattcataataatggtactcttacagaccttgagaacaagctaagagccatcattaaagtttaaaagagagaatgaagatgagagtaaaagacaattttaaagttattgaccaccgtttagtggaactctcatctctttccaatgaggtaatgattgaacgtcttaagagagttgaatcacgaaggaaagagattgcagatgaaattcatgaactggacaagattgaaaatggattgaaggcagaactacaacgaagaggtgctaatgtctaaaggtcgtaaattgaaagaggctggtcagtttgttggtcattgtgcatgtccacgttgtggttcatcagatgctggttcaatctatcatcatgacgatgattcttattcgatgacttgctttagttgtaacaaaggtttcccagagtgggattttgataaaggacaaatcgtgagcacttattctactggttcagacaataaaaaccgtactttccgtgggatggatttagacgatgtaaaagacaaccttgaagcaatggacttaaaggacaggaagattcctgcaaaagttcttgagcgtttgggtatcaaggttgacattgatagtgacggtgaaattgatgcgcatttctacccaacttacaaacgcaatgaagatggcaagctagagcatgttggctaccgtgttcgtcaccgttacccagaagaccatccaaaagagcacctacgcggtaagttaaaagacttttctggtggtgttggagatattaaaggtgaactggcaatgttcggttcatggattgctccagaaggtggtaaccgcctattcatctgggaaggtgagatggaatgtgcgacagcaatctatatgacttctcttgcgattaaggacaagtctcgtcgtaagaattactgtcacgtatctgttccatcaggtgcaaacatcaagtctatcaaagataactatcagtacattacatcatttgatgaaatttacttgtgctttgataacgatgaagcaggtgctaaagccactaaagaggctgctggtatcctacctattgagaaggttcgtttattccagtatccagaaggtgtaaaagaccttaatgaatggtggacaaagttctataaagagaaagatacagttctggaaggatttaagcagcgtatctacaatgcacctcgttactgccctgctggtatcaagaactttgcagacggttttgaggcaatgaagaatcgtggtcagattccattgattccttttccagaatctttcggagacttgaacaggctaacttacggtggttacggtttaggtgagattacgactattgcagcaccatcttcagtaggtaagtcagcttacactcgtgagatgatttattcagcttggaaagaaactgattataatatcggtgtaattcctgtagaagatacctatgaagagttgatggaaatgctctgtgcaatccacctgagcaaacagatttctgagattccttatgatgaacgggattgggatgaattaaagggagcacacgcagagctttcaaaaggtcgtcgcatccatatcgttgaccatcaaggggcgattgaccaagataacctgctggagtttgttgactatcttgttaacagtttagactgtaagattattattcttgaccctattacattggctctgtcacgttctgatacggatgaagaggaagtcttgtctgaactattgcgtcgttgcaaacgctaccagtatgcacaggtaaacgtttgtcacgttcgtaagagtgcaggtggtcagaaagctaactctgaaggtggagatatctctgaagaggatattaagggttctggtgcgtatttccagatttccatgaacaacattctgttaatgcgtaacaaggttgacccagaccctgttaagaaaaacttgacaaaaatcaagttaactaagtgtcgtcgtcatggtaagtcaacaggtattgctggtcatacttggtacaatccagacacaggacgtcttatcaaagcttctggatgtggtgttgacattgatggtgcagcagaaaatattcgtcaacagtttggtattggtgaagctgaagaccattatgacgactctttacctcattatgaggatgaagtgtttgaccgtgagactggtgaagtctatactgaagaacagcgtcaaagctcaacgattccacctgtattaagtgaggatgcagatgactgcccgtttgaaactgagtgatagttacaaaagagaggggttcatacccttctttgaagaaaaaagtttaaatgaatttcaggaagagtgtttgacaaaggttgataggttctatagaatgctctacatgaaatgtgatggaggcgttgaggtagaagaaaagttccatcacagtatgataacagtcactattactatacctcgacataatattggttggctgtttataattaaagaaaatgtgtttgaatatcaagtatatcggagaatatcatgaaacactctaaagcatttgaacaagtttttggggattccttaaaagccactgctggtaaaccagcaaaatactatgaagagaagcgtgtaagaactggaaaaactgcacgtaaagcagcttctaaagataagcacaacttccagtaattaatgtttgacaatagagtatcaacaaattagaattggtactcttcataaattgagatagaggtttaaataatgtctaaagttgttaaaatgaaagctccggtagagaagtacaatggtactgaacgtcaaactctgcgttaccttctgaaagatgtttggttttattacctgaacacttcaccacgtccgggaaaaggtaaatccattgataagaaattcccaggcaaagactgcaactacagtgtttcaattctggcagaagatggtaacaagctgtttaaagagtttactaagtctaagaaaaacccagaaggttgggataaagttactactgaagcagttgatgcagatgacttcgaagagaagtttggttgtaaaccaccttttgaagcagacacttactacatcttgaaagtaagtcgtgcagcagcttataaagatggtgctgtatggacagctaaacagtcattccctgtaatgctgattgaagaagtaaatggtaagcgtgtagctgttaaacagccgatgaagaaaatcaaagctcaagcatccgataagcatgaagatgacaagaactatgatgtaattcatccagatattgcagttggtaacggttcttttggtagtgtgattctttctactcacttctacacttttgagaacaatgttctgacaaaacctattcaggaacagtttatcattgatactcttgtaccttacactggtggtaacggtgctaacggtgaacctgaactggatgaagacgaactggctatgcttggtcttgatggtgttgaagataatggtgaaatcactgaagaagacgcaacagaccacaaaccttcgaacaattctgatgatggtgacgatgaagacttgccagacccagatgacgaagaagatgaagacttcgatacagaagactaatctctaaaagttactttaaagccctgtacttagtatggggctttttcatatggagagtcacaatggagaagtatacactaacaaaacttcccgattcagttacacatgtctttattgactctgatagcattgcctataaaggtgcttgtgtagttgagaaagcaaaatataaatatgtcaataaactcacagcagaagaatctgaaccatttgataatgcaaaagatgctgcaagatggttagcagaccagagaatccttgtggaagagcttggcctgacatttgatgaagatgaatgggaaagacagacttggaaagaagctaagagtgaaaaagaagctatcatggctactcagcaggttcttcaggaatggcttaaggttgttggtaaagaaagaacttgggtaggctacttaacagagaagggtgtacataaacataaagacattaaaggtcttgagcaccaatatcaaggtaaccgtaaagatgctgtcacaccaacacacttagttgcttgtcgtgaatatcttctgtcaagaccagagttcaagctcttaaagggaggcttcgaagccgattccatcgtaattgctaaagctgaaaagatgggtaagaaggctgctcttatgagtattgacaaagaccttcgacaagctgaagggacttattgtattgatatgacttatgaaaagtcaccactaatttttattgctgataataatgttggtgatatctgggattgtcctatcaaatcaaaaccaaaagctgcaaaaacagttggtgtaggttttaaatttttgtgttatcaggctgttgctggagataatgcagacaactacttcggccttaaaggtgctggcaaagtagctgtgatgaatgctttagatggtaaagagacctataaagagtgtcttgatgctatctatgaactctatgctaaaaaagagtcttacacctatgtgtcatgggatggacagactgttaccaaaacaccattagagttaatggaacaacatttctgggtagcatatcaagagagaaatccaaaagataatttctcttttaagaaatataattgggagccgtgtatgaatgaagattaaaggatttggcaattgccccacctatggtcattgggtatctttgtgtggggaagttgaccccactaaacattttggctttgtctatttagtatactgtaagaaaaccggacaatattatatcggaaagaaacagcttaatagtgtgaccaaaagaaaagttgctggcaagactcggaagaaggtagtcactaaggaaagtgattggatgacttatgagacttcttctgagtatattaaaaaagatattgagagctttggaaaagaattttttgacttttatattattcaaacctaccacacaaaaggtggtctagtttatggtgaagcaaaccttcaacataaattcgatgtaatgacaaaaaggattgactctaagctcagactcttctacaatgccaatattgcagcaattaagtttattactaaagaaacttatgaagatgctgaaaaaagaatccataaggtaatgaaagcaaactgtgcttgataactattgagagagaataaaatgtttaacaaaagtaaagctgtgagtcatgtagcaaaagttgatagcaagattgaagaacttgagcgcattcttgcaaatgccagagagtcaataattaaagaggttgaagctgttgaatctcaaatgcagcacctaatgcttaaacgtcaagagctacgtgagcatctggaatatattgaaacacgagagctaaaggttaacagatattttaaggagtcagaatgtttaactcaagagaatcagtaaaaaactggaatcttcgttgtggaaacactcaaaagcaaccctacagcaatgagtattgggaatctttgaaatctcaatctctatgtatgcttgaagaagcaaaagagcttgtaaaagcaattgaagagaaagaccccattgagacactggatgctcaggcagatttgcaatatgttcttgacggtttgatttacctgtcacaacatgaccataatggtgctatggaagctgtttgccataacaatgacctaaaatacacagacaactatgaagaagctttaaaacgtcttgcagatattgagaagcgtactggtcaagagtgtatcatcagaatgtcagtagttgatggcaaagaatggtatgcaattgttcgtgcagccgatgggaagattatgaagcaatctaatctccctaaagttcagcttggtgaatacattgtagaacttgaaagccaagaactttttgtggtagtatctgagacatgcgttatctgcaaaggtattgtatgtagcttaaaggatttgggtgtagatggttttgtagaagttaatccaattacctctaaagcagataaagatttctgtaaagagaatggactatggattgcagatattgtctactatgatggtgagcagttccatgtaacctcatacccaaaactgaattatgatgctaataacctgaagtgctggttaaaaggggttggttataatggattcacagaacattaataaagaaggtgtggctcagaagagccacttctcaaactacaatatctctatgacggtgtttatgaatgacccgttacttgagaagtatggtgagactccagatacacttctggataatgaacaagttttaaaagcagttctgtacaaatacgggattgatattgagaaagagtattcttttgaaatctgtcaacacaggaatacttttggtaaagttgtaatggctccactcttcatgggtgtagaaagaactgactatggttggttatatctaaaaagaaacttggagaaataccgtgtctaaagcaaaaaagctatcttatgatgacattatctcaggtgctaaattaggtgttgatagtatcggacaagatgttaagcacggggacacagtcatgtactgtgacgacagaagaggcagaagtgcaatcttgtttggaagagttgtgtgcaagatgcgaggtaattacgttgttgaagacatgaatgtggatgtcacaaaacagcttgaaataattatgaatagtgatatatcatggttcgtgaattgtatgcacacctcttcagtcacaaaggtaagtgataagttttacgatatgtggcagaatgagcaaattttcaagatttaaactagggagcctcttcggaggctcttttcatctgtaggattcaaaaatgattaagacaattaaaaaatcaaacggtacagtagtaagctttgacccagaaagactgaataagtgggcatcatgggcagataagcgtggaatcatctggtcagaagtcactatggaagccatgaaacgtgtctatggaggttgcactacaaaagagatgcaccaagctatgattgatgtttgtgttgataaacaaactcaagagtactcagacatggctggacggctacttctaggaattatctacaaagaagcctttggaggctttactaaggttcctacgctggttaccttcgttaaaaatatggagagagcaggactttgggagaagatggattactcacaggaagagcttgaatacctgcaaggttacatcgtgcactcaaaagatatctcttacggttatgcagtcttgaaacagttcagagacaagtatggtatccgtgatattaaaacgggaagactttttgagtcaccacaatttatgtttatgggtatggctatgaaagcctttgagaagcaaccaaagcaccgtagactgcaagatgttatcaagctgtacacttacctatctgacctgaagattaacgctcctacgccttatttaaacggtttgagggcaactaaatcaggttatgcgtcatgctgcttgattaaggcaaacgatactgctgaatcacttggtattgctgcaaaggttgcttatgatatgactacaaagcaagctggtatcggtatgctgatggagactcgcactattggtgatggtatccgtcaaaacactatcgaacacatgggtaaactgccttattacaagcttgtacgttcatctgtagaggcaaacaaacagaagagtcgtggtggttcagctaataacttctacactgctctagacccgcagattgaagatttactgcgtttgaagcaccctacaacggttccttctaaacgtattaatgagatggactactcattcggcacaaacgattatttctggcagtgtgttcagtatgatacagattggttgctattctcttacaaagatgcaccaaaactctatgacatgttctacacagcatctgctgatgagtttgctatggcagttggtcacgcagtacattcaggagttaagcacagacgagtcaaggctcgtgaaattgctaagctgtttattcaacagcgttatgctacaggtcgtgtgtatccattcttcactaacaacgcaaacacacatacaccatttaaagaaccattgaagatgtcaaatctttgtatggaaattgtgttgccagtgtatggttttgagaaagagacagacctttacagagacgatgctgtgaaagaggatggtgaggtggctctttgcttcctagctagtttggttgcagggagaatttcagaagatgaatacgctgacgttgcttattatgctcttgcaatggttgactccgttattgaccttatggattatccgtatccatcgatgcgcaaccatgttcagaagcgtcgttctgttgggattggccttacaaatgtggctcattaccttgcgaagaactacgtgaactactcttcacgagcaggtaaaacgaaacttcatgaactggcagagatgcactcttactatctgcatgaagcctctctgagacttgctaaagagcgtggcgttccagagtacatgaagttcactaagtatcctgaaggctgggttcctccaaagacagctaacaagaagattgatgaaaagcatgatgcaaaactacgatatgattgggatgacttagcacaacgtatcaaagaaaatggtggaatccgaaactctgtattagaagcttacatgcctaatgagagttcttcactggcaactaatacgacaaatggcttgtacccaattcgtgactttattttaactaaaaagtctgcaactggtaacgtgctgtttattgttccagattatgaagagttgaagtatgtatatgaaattgcttggggtattgacacctttgacctgattgattgttatgcaattgttcaaaagttcactggtcaagctatctcttcagatttctatgttgactacgcaaaagctaagaaggtatcattggctcaagctttgaagtacatgatttatgccaactcggtaggtatgaaaaccatgtactaccttaacagtcgcattggtgtaggtaaatctgcactgcaagatgcttattgcgagggttgtggtgtttagttttaataactatgagggtcgtagaagaccctctaaaaataactttggagagaccatgaaagatttaatagaaaaacatgagcgaccaatatacttgctctacaaaccccgcaaaacattgtactatgtgagcagcacaggtatcatgataaagcagaatgatgacttatgggtcactggagcctcttacatctctacagcagatggtaaaatctacgcaagaccttatgagatgtttaacaaagagaattgggaagttttagacagaaaacaagccttagaaatgataaagaaaggagaaatcacgctatgattaaccagcacccaatctttttaggtggtgagagaaaaacttttgactcactcaataagcactacccaaaaatctttgaactttataaacaacaaaaagcacaagactggtcagaagatgagttcccttttgaacaatcacgtcttgattttgagagtgtcccagcatcaatgtcaggtgtaatgcttgagattcttaagtggcagtgggaagcagacactcaagttgctaagagcttggcatttgcctttgcaccctttatctctgatgacatctatgcaactgcaattatgaagcagtctgagattgaaaacctacatgctcttacttactcagagattgtaagacaatgtattaaaaaccctgaaacaatcttagatgagattaaccagaatgttgctgtacaagaccgattaaaaactgtgaatcgtgttcttgaagaattactggatgaaggtataaactatcgtctgagttatgtgcgtgactcacttctggacaaagaccctttacacttccataaagtgattctaaaagggttgtttgcagtgactgcgcttgaaggtatatcttttatggcatcctttgcatgtacttttgcacttgatgctcaagataaatttcagggtattgctcaagctgtccagaaaattatgcttgacgaaatccttcacactaaaattgatattgaagttttaaaagaaactttaagagatgatgagtggcagaaagcttttcaacaaattcttccagagattaaagtaatcttagatgaagtagttgaaagtgaagagaaatggtcgtattatatcttctccgaaggacgtgctgtagttggcttaaatacaaagcttcttcatgagtgggtttactataatgctgccccactgtatgatatgtttggcattcccagagattttgtagctcctaaagaaccacctttgaagtatatgattaagaagatggaaattgataaagagcagaatgctaatcaggagcaacagaacggtgcgtacctattgaatactgttgtagatgatttgaatagtggatttttagaggttccttaatgacttatgtaatttactccaaaactggatgccctcagtgtgagactgcaaagaattttgcaaaagctcgtggtattgaccatgttgtgagaatgttagggcaggactatgaactatcagacctgatggagattgcacagatgccagttcgtcagatgccattcatcatgaaaactgatggacaaaacctaaaacctgttgggacgctacagaattttatggcagaggtgaataatgcttaaacgcatttgggaaggtttggttgttgatgcaccagcgattgtgattggtatgttgattgttaacctatttactgactttgaacaaggttcattgtttggagccatgttactatgggttatcttcgaaatattagagatacaattaggtatcactgaaaaactaagagaactctttgcgaagttttctaaaaagatttaaaatgaaagggtctcttcggagacctttttagcatgtaaaggggcaataatgaacaaagtacagattattaaaaagaatggctcactcgaagaacctgatatcaaaaaagttttagcagcagtcacaaagtcagctaacagggttggatataaagaactgccaccagatgttacccaagctcttgagtcagcatttatgaggattctggtaaagtccactaaacagaataatttactaatttcggtaaatgatattcacagtattgttgagggtgctttggcagaagtcaatcacgaaatctatgagtcttactcaacatatagaaattaccgtaaagaagttgctcaaaattgggatgagctttaccagaagaccaaagatacactcttcttaggtgacagagagaatgctaactttgacagtagtttaatctctacaaaaggttcaattattcgtggttatctgactaaagaaatctttaaacagtaccatttaacaccggaggaacttgaagccattgaaaaagggtttatctatatccatgatttaagagacctaatttttggtggtatcaactgttgcctgttcgacattggtaaagtcctgaaaggtggttttgaaatgtctggcatcgaatattgtgaaccaaagtctgtactgtcagccttacaggttattggtgatgtagttctttcagcaactgcacagcaatttggtggctttactttagcagagattgataaggtacttgtaccgtatgctaagaagtctctacgttaccatgctgaaaaagcagcatcttacggtattcctaaagaacattaccacaattatgtcatggagcagctacagattgaattaactcaaggttttcagtctcttgaaatgaagctcaatactgtaccttgtagccgtggggattttgcattcacaactttgacattcgggttacttgactcagatatgtctaatgaagataaccgactgcaatacatgattgcaagtactatcctagatgttcgtatgaatggacaaggtaagagcaagaagcctgttgtattccctaaactggtttatatttatgaccagaaaagacataatgagaatatctgtcaaggccacctgtacagtaaagctattgagtgttgctctaaagcgatgtatccagatttcttaagtgtatctggtcatggtgctgtagcagaagcttttgagcgttctggcaaggtaatttcgccgatgggttgtagagccttcttatctccatatcttaatgaggatggggaagagttctacgttggtcgtgctaacattggtgctgtatctttgaacttaccaatgatttaccagtattctaaagagaatggtttagatttctggaaagagcttgataagtacctagaaatgattcgcagcttccacaagaaacgttacgaaatgattgctaatatgccagcaagttctaaccctcttgcatttacacaaggtggtttgtataaaggaactaagaagcctactgacagggttggttgggatattgtgaagtccttcacagcttcttttggggttactgcgcttgatgaactatctgttcttgctgaaggtaaacgacttcatgaagttggaagctgtagttttgcatacgatgttctggaatacatcaacatgaaaactgaagagtttaaaaatgaagatggtttcttatatgcagtctatggcactccagcagaatcactttgtggaactcagctaaaacagttcagagagatgtttggcgttagcaaaggtgtttctgataaggaatactttacaaatagtttccatatgaatgttgcagcagacatcacaccatttgagaagcaggacttagaagaacctttcttccatatctgtagaggtggaagaatccagtatgtaagggtagctaatccagagaacttatcagcacttaagagttgtattacaagagggatgttgaaaggtttctatcagggacttaactttgacttagcaatctgtgaacattgtggtaacagaccaaaggctgatgttgaagaatgtgaggtttgccattcacatgatatctctgtgattaacagggtgtgcgggtatcttggatggactaagattaaaggtgaatcccgaatgaacgatgcaaaaatcgctgagattcgtgacaggatttctatgtaaaacttgacatggtagaaatcaataatcaacgtaaggcgttcctcgatatgctggcgtggtcggagggaactgataacggacgtcagaaaaccagaaatcatggttatgacgtcattgtaggcggagagctatttactgattactccgatcaccctcgcaaacttgtcacgctaaacccaaaactcaaatcaacaggcgccggacgctaccagcttctttcccgttggtgggatgcctaccgcaagcagcttggcctgaaagacttctctccgaaaagtcaggacgctgtggcattgcagcagattaaggagcgtggcgctttacctatgattgatcgtggtgatatccgtcaggcaatcgaccgttgcagcaatatctgggcttcactgccgggcgctggttatggtcagttcgagcataaggctgacagcctgattgcaaaattcaaagaagcgggcggaacggtcagagagattgatgtatgaaaggtgatgtgggtcttgataggcttacatcacctttttttttttattggatgttagatatggcagatagtattattgggttattcataggttctgtcttactagggttctttttaggactttcttattgtgaattgagagataagttaaaatgtttaagatatcaaaaacgatgatatacatactccacattctagtcttcttctttggggttagtgttatggtatggggtttttcagacccacaatggagtttctcatatcatggtcagatggatttatggtcatgcttcaaaccatttttagggttagctatagcattcagtgcattaccaactaaggtgaaattatgattaagttgagccaaaaacagttagagtggattaaggattacgcctcagagtgtggctcttgtgaaaagaatcacgtaaggtactcaacattccacacggtcttcacattgtatgttggcgacaacgttctaagtgattccgtagtggatggtgtaccgttacctaatgagttacttgacaaattagctgtagttactggaacgtggagtgaagaagatggtcacgacctatctaacgatgttgtcttctacagtcttgaaaatattatgaatccagagtacattatgctaatgacttgtgcacaagactgtgttccattacaaaacttcattaaagagcactgtgaagagtttattactaaacaggttccttgtcaggtagtgtttgaatgagtaaaacaattaaatagtattggtgaggtaactagatgaattacatggagattcgaccatttgacacagctaatggtgaaggggttcgggtaagcctcttcgtagctggctgtaaacatcactgtgaaggctgctttaacagggagtcttggaagtttaatgctggtaaagagtttacttatgcaaacctctacggcatcattaagttaatggatgataaggccattagtggactgtcaatacttggtggggagcctctggatgatagaaacattcaagaggtcaccaacatatgcaagcgtattaaaactgtttatccagaaaagtctatatggctttggacaggttttcaactgcacgaaaaaatccacttagatgtgatgaaatatgttgacgtggtgattgatggtaagtatgattcatctaaaccaacagttaaaccatatcgtggttctgataaccaaaacctctggagaaaagagtatgggtggcaaggtgattgtcagtggagagccgagtaagtctcgtcgtaaagtaggttatcggtaaaggccactttacaatgtgctacagaacaaacttaaccgttggtgtcactgaagaagaacttaaagcattttgtgaaaagattgagagagatacgaaatgggaatctggaacagttttaaatcaaaagtaaaagcagcactggcatcactaggtatgctcactggtgttgatgtgactcatctcatgcagcacttcaagatggatgagaaactagctaatgagattatgaaaagtatctatgtaggccgtggtaaaggtggtaagaaacaagcacatcgaccaactggtgcagcagctattaaacgggcagctaagaaagctcgtaaccgtaaacgtaataagaaggctaaataatcatgagcaaagtttataacactcgtaaattacagattttcgtactgtgccagtttatggctaaagagtataactgctactactgtggcacagggttcatcagtgacaatgacggctcatatctaccgttcaaagaggctgtaaaactcttcaatgaagaagtaagctctaagaaagatatcgaaaaggttaagctaacctacagtaagaaagataagaagattatctgcctagataactttgtaaaagttactggagaagcaaaagagtttatggatgagagtgagatttcattcacaagcatcttgaaagtagctcagtaaacagatactataagggaactgcaaaggttccctttttatttttggagataacatgtatctgtcaaatctgaaacgttcggctgcaatgtcagttctaagactcagctttgaggaacgtcaagagttcattgactcccaccaatacgacccttctaactctaaccgcatgattctctggaatcgtgatagtactcgtgaaagggcactattccgctattacccacattacaccatagataacctgtatgaatgttttgttgtgaagaacactatcacaattctcaacaaactttgcagatacacaggtaatcaatccttcacattaggtcaccacaagcctgttacaaaaggtggtgaacatcactgtgcaaactggtttatccagactaaacttgataaccagaagcaaggcgatagtcttttaagcacccctaagatgacctatgaagagcaagagaaatatatcaaaaataatatgccagatgtgcttgacaacagctatacagatttggcaatatctctcctgttgaagttcgagacagtttatagggcaacttacgatggctagaacagattgggaagtaaaagaacttgtaagtgatgctggaaatggctgtgaggtgtatatgattcgtggccatgtgccagacccattagctattgagatgattgaccatcacacaagtggattctacaaagaactcggtgaaccaagtgttgaaagaacttggacaaaaccagtaccagatagcacaggtaactgttcagtaatctatcacattgtgaatccacaaaaatgcaaaacagctatggctgtgacattcgtaacttttgattgagagagaaaattatgaaaactattattgaagccgttgtcaccgcacaagagaaattcttccacacagaaaaatttaatatcatccaatttccatctggagaaattggtggaaacttctctgaagactttgttaagtttactgagcgtaatgctggtaagattgacaatgttatattgactgtgcagggatatgataaagatacactgtttgcattagctttggctaaggatgccgttgacagtcttgttccatacaaatcagcgatgaaaaccgttgttttcgggttcttaccaaatgctcgatatgaccgccatatgttcaaaggtgattcagcagcactgaaagcttttgccaacctcgttaatgcaatgggctttgatgcagtgtgtgctcttgaccctcacagtaatgttgcagaaaatttatttaagtgctttcagagcatgaagcaaaaagatgtagcagcacactttgcaagtgacccacgcattgatttcttggtagccccagatgcaggtgcagctaagaagactgaagagactgctaaagaggtagataagccatatattacaatgtctaaagtacgcaaccttaagactggtgaaattactggtatgcgaatccttgatactgttgatttgaccgataaaactgtcatgattcttgatgatatttgtgatggaggccgaaccttcatagaagcagctaaacatcttcgtgaagcaggtgcaaaacgtgtggaactctatgtaactcatggcattttctctaaaggtgttgaaaacttacttgacaatggtgttgaccatatctacactacaaactctttaggggaagctaaagaccgtggcttaacacattatacccaagttactgtagtaaccattgattgaaactttataggggcttcaaagccccattttgagagagattaaaagatgactaaatcactttatgcagtaccagcaggtttaaacgcagatgcttacaaatctggtcacatttaccagtaccctagtgcaacagaatacttgatgttcaatctgacaccacgtagtgataagtggttcaacagccccttagcaattgatggtgtagtcgcttttggtattcaacgttttgttaaagattacctgatagaccactggaacgccaccttcttcgaacgtgacaaaaaagaagcaattgacgaaatcttagaagttatgaacggtgttctgggtaaagatgctattggtcgagaacattgggaagcactccacgacttaggttatctaccagttgaagtctacgctgtagaagaaggcacagttgttcctatgcgtgtaccaatgattgtcttccagaacactgtttcaggtttccattgggtagcgggatatctggaagatgctttctctgctgagatttggaaggcttgtaccattgcaactattgcattgcactacaaacgtatctgtaagaagtggtctgaccttacttgtgacaacgacttacatttgccttatcagtgccatgactttgctatgcgtggtatgtccggctttactgatgacgcatttaacgctgtaggtcacttaacaagctttaaagggactgatagcttccctgcggtatatacagctaaacgcatctatggacagtcctatccaatctctgatattggtagctctgtaccagccactgaacactctgtaatgtgtgcaaacattgcttgggaaggtggtaatgagttgattgaagaagaaagacgcttcaaaggtgagttacaaaccttccgtcgcttcttaacagaaacttacccaactggtattgcaagtgttgtttcagacacttataatttctggagaactgtatcagtaatactaccagaactccgtaaagagattatggaacgtgatggcaaactggtaattcgtcctgactctggagaccctgtacatattgtcacaggatataaagcaattcacttagagtgtgctaaaaaggcttattacgaacacctaagcaagcagaatgccagtgacacaatgttgagcaccgtcctgaacatgaagcttgaagatattaactatgttatggctgggtggttacgtgcagaaggctatgaaatggtggttgacagagaagactttgaagtagccgatacagtgttgctgaaagatgcttacatcaacggctctgcaaacgttgtaacacgtcctgtagcggagattgatggagctattaagacactgtacaacatctttgggggaactattaactctaaagggtttaaggtactggatgagcacatcggccttatctatggtgactctatcacgctggaacgtgcaaacgaaatcctgaagcgtctgtatgaaatgggttttgcaagctctaacgtagtgtttggtgtaggctcttacacttaccagtacatgactcgtgatacctttgcatttgctgtcaaagcaactcttgcaagcattggtggtaaagagattatgcttgcaaaagaccctaaaacagatagtggtgttaagaaatctgcttttggtggtgtagcacccatgtgggatggcgaaaagctgaaagctgtagatggctatgggttccagagctttgcagatgtacttgaccacccagcttgtgctttacgtctagtctttagtgactctgagcagttcggctacacaactcttggtgatattcgaagtaatattgacaagcagctttaaaagtatatgataagaggctcctacgggagcctttttaatttctggagaatattatgaaaatcaaagagatgaacatcaacattgtcttagaagaacgttgggagaacatcaagaagcctgaagatggtcataagttccttaacaaaatcttagtagcagctaaagaggaactgactggtaagattgcagcagcaatcacaataaaggtttgtgtaaaaggtcttccagacaaccaccaatttgcacttgacgagtttaaagaaagcttctacaatccaaacaaacagatgcttgaaagtaactttgcagtgtctacaagtatcgtccatgacagaagctttatcctttacaagaatatgagaggtgagtcatgcaagcatattggatagaaattttactgtcacttggcagtgtagcagtctttgtttaccttctttgcaagtactatgcagagcacaagaagtgtgattactgcaatggggaagggtatacaagagcaggttgttgccctatgtgtggcggttctggtaaaatgtttaataagtaattcaacagtaaactaagaggaaagtattatgcgcatggtaaacgaccacgcagaagtgattaagagttcaacttctttggagacatctcaagcacagattacaatgacacctgaaatgttcagccttctgagttctggtgtatacacatttaaagaaagggcagtgattcgtgaactgtcatgtaacgcagtagatgctcagaaagaagctggaagagagaacatcccgttccatgtgcatttacctactcgttttgagccttactttgaagttcgtgattttggaactggattgactcatgataaagttatgagtttgtacctaaactacggggcttctacgaagaatgactctaatgattacattggtgcaatgggtatcggctcaaaatctccatttgcaattgctcagtcattcacagtatctagctatgttgacggtgttgttaataagtactctgtttatcttgagaatggtatccctcaagtaactaagctgacaactaacccaacaaaagaacctaatggtttagctgtacgtgtggcagttgctgaccaccgtatctcaaagttctttgaagaagctggtaatgtatactcatactttgctgtaaaaccagaaagtaatattgtgtacgacgatgtattagcagatatgaacgtcattgcccgtgaagagggtgtttatgatgccatgattcataagcaaagttggcgttctagtggtaacaggacagagtttaatgtggtgatgggtaacattgcctaccctgttaacatggaagcattacttggtgatgacttcttcaaagtattgccagaatttttccgtaggagcgtagaccttgtaaacatctacatgcctattggttcagttgctattgcagcttctcgtgaagcattgcagatgaatgacacgacaaaaaatgttatcattgaggctactaaaaagataactgaagccattacaaaggatgttatcaagaaagttaatagccaacctacactcatggatgctgcacaggcttatgctgagttacgtttgaactcacgagagatgtttaatgctgtgtgtccaaagctagagtggggaggcgttaagcttgattctctggaagaagaattgctaaacattcgtcgtgggattatctacgcagaagacggctcagtcatttatgaacgtgatggtaaaggtaatattaaggttgacagtaaaggaaacaacattcctaaagtggactacctatacaatccagttgcttatgtcaagttcaactctttagagagtaagattcgtgcaacagcactttcctacactcaagaggcaagtatgttcaatatctttggtgcaatgcgtaaaagccaaattgaacagtttttgttcgtgattaatgaccgtcgcaataaaaacggtactgagaagactgtaggacgcaatcaaattttgcgtggtgcatgtcgagactacgccagtgagtcaaatctgtttcacagatacaatggtattgtctttgtattctcgactgaaaaagagttagatgatttaatcaatctacacaaacttgataaaagcttgttaaagattgtgaagatgtctgataaggaacaccactatcagcgtaaagaagctgtaaggggtgttgtaaaactctggaaagctgttccagcagaaactaaagcttcatacaaagaggtgtcagaagacttagacacaattgaagagcctcagctttatattaaggcagtaggtgacacagttgatggtagatgtttttgctcatctccagaggatgtagctaagtcagttgctaatgttacaggcaagacagtctatgttttccgaaaagcaaattggaaaaagataccagaagactggattgaagtagatgagaagctcttgaacgacagcttaactgatgttcattggattaaccataacaggtatatgacacgcatctacatggatggtgtcctcgaccttacaagcagttggattattgccagaaactttacgttcaataacaggaagatttctcgcgggtattgttattcaagggatactattaagacaatcttcttagaagggaatgaagatgctgttgaggcaatgttcggtaagattcagtatgtggctgcaccgtttgcatacacttacactatcagtgttcttcaggatttgaagtcatgccttgataatgacacaaaactgtacaaaaagattaaaaaagcaggtgaccgcatggttatcaagctgacaaactatctttcaaaaagaaaacaagaaaacttcttgctttcacacttagattggaataaagtatcacctatcgaagtgagtaagtttttaggctttaatgtgaaatgtgttccagaaggtacaacaatttacgattaaagtgtttgacaaggggctttgaagccccttagaatagcctcacaaattgattgattaactaacaagagagagtaataagatgactactaaaactaaagcacagattgacgcagaaatttacaaactggttaaagaaggtaagctgactaaaacagctattgcacagaagttcaatacttcaacccgttcagttggtcgtgctgtagagcgtcatgaagcaaccttaaaaggcaagaagaaggcaacttctacaccagctacgaagactttgaaacaagttgctaagacttttaaaaagaaagctggcaaaccagttgaaaaggtcgttaaagacactgtacagaaagctccagtaaataaactgcacgaagctatgcagaaagatgacaagattgagtacatgattactggtgattctgtaattatgacttatggttcagaatctgaaattgttgagtctactcatccgaactatcaagagattgtagttcatgttgtgaaaggtgagttcaagaaagcatttgaactgatgaacattcgtaagtctatcgaaaacttcactcagggtgctatcacaatcaaaggcgacaagctattctacggtgctgttgagatgcgttctactctggttgaccgtattcttcacatgatgaaaactggcgataaaggttttgaacgacttgtaatgttcttcgaaaaactgatggaaaacccatctaaagattctgtagaacaactttggggatttgtatctcaccttgatgttgaaattgatgaagaaggctacatcattggttggaagaaagtctctactcgtgaaggcaagctggttgactctcacacctacaaagtgcctaatgatttgggtaacattgtagaaatgccacgttggatggttgataataaccgtaacgtaacttgctctcaaggtcttcatgttggtgcttgggattatgttcgttgcttctcaggtgatacaatcctgaaggttcgcgtacatccacgagatgttgtatctgttccaactgattacaatgatatgaagatgcgttcctctcgttatgaagttgcagcaatcgttgataatcaacgtaaagtgctggaagcatgggacggtaagactgaagctttgcatgtcatcgttggcactgctggtgaactcatctctcaacgtaaacgtgaaatctaataagtaatttcttaaaaggctgcttcggcggccttttttatttgtattttgtgcagagtgctgtataattgatgtcacgataaactaaacaggagaaccaatgaagaaattgattctaggtttgtgcttaatgtttacagcacacttatcttatgcagttgactgcccagagctatcaattagtcaaaaagtaaacatgttaaaagcttaccagtatggtgagaataatatggggaaaggctggggtattactctagcagctatagccttacaagagtcagagttaggtctgaaggtagagaataaaaagacccacgactatggtattttccagaatcacttgaagactgttgtaaagcgtaacaaaattagtcctaatgtggctaaaaagaaactcttaaaagactttgactatgcagcaagagagacacataaagagcttgagttttggactaaggtacatggtcacccaaagtcaaagaagactttacaaaaagttttagcatcatataatgctgggtattcgtacaaaatccctaaagctaagaaatactctcaagatgtctataacaatatgaaagttatcgctcaatgtgaatttgcaacaaacatttctaaggtaaatcatgaaaaaattaagaaagtctgatgaagtcctgtgccatgcttacgacttgcaccctcatgagttaggtcttgattcctgtgtatggactccagaacagtgcagggattttgaagatactgcaagagaagttgtatgttcacttgaagagttccacacatcagaaccaattgtgagcgttgtggacaaagagactggacaaactgtaggtgtaaggcgtgacagcttagtcatagtcaataaagaccttgtagaaaaaggtaaccttatcttagcagatattgatggtgttcttacaaattttaatcacgaagattgctcaacggaattgactgatgggtcattctcacagtacactaatcttcttgactctgtaagagcaaaaccaacatatgtttttagtattattgatgcaattgctaatcatgctgccattggactcttgacagcgagaggtgaatctcagagaatacctactgagatgtttttaaggcataacatagagcatgattacatgctttttatgcgtggttttggaactaactctataagtgcagaaagtttaaaagtgaggatgattcagtcttgcattcttccttattttaatatagtatgctttatagaagatacagagaagaatgttcagaaggtaaacagaatccttccacacattaaaaccatgttagttaaacattgagagaaaaacttatgaacaatatcattacggtagcactggacgatacggcaaacaaatctgaagtagttcgtaaaatgattcaaggtaactttgaaggtaaaattttccgtgctgttaatgtaaaagctgatggcagtattcgtgaataccgtgcattgttgaatgttaaaaagcacgtaaaaggtgctggttcaacgactgcacacaaagaaaacctgatgactatctatgatatgggtaaggcttcagagttaggtgctgaaggtatcgttaaagaaggtgctccgtatcgctctttcaatctggaaactactcttatgctttcctttacgagtggttctaaaacaatcacttatctctttactgatgctgcaacggtatctgctattaaggatagcactgtcaaagctggcgtagttgctgctgcaaaagcttcttcgatggctgcgaatatccttgctaaagtcctcggttaaggttaagatacaggctccttcgggagcctttttcatttcaggagattgttaaatgacatttaaagagttctgtcaagctactttcataattgttttcttagttggtgcaggtgtctggggaggatactcttacagagactatcaagttgctgaaactgagctaaataatgagaaactaataagtgttgctaaagatgcttatcaggaaggtttagccacactcagcaccaattacaaaaatgatttgaaagatgtgcttgctaagaataagcatacaaaagaggtactaacatatgaaaaaactaagccagagttttataatgtttgtgctactgataactatgtcagggtgttcaacgaacaaagtgaacagtacattcaaaaactcccaagtaagtgagagtgataagtacactcaagaagaatcacggtatatcatcaaaggcaacacaggcagtgatgtagcagcagcccttgagttctatcgtgacggcttttaccagtgcacaatcaaagctaacaaccttattgacatgattttattagggaataagcagcaatgacagagaatcaagatactttctatgtagaaggttacttactgttgccacgaccaaaagaaacttatatgcgaattgatttcttaccaaccattatggataatgtgatgtgccatatctttatgcaaggtgtcacagcacagcttaagcatgttggtaaagagtgcaaaataaaggttgacactcatccagaaatcaaagagaatcactacacatggttcttaccagactctaaagaaatcttagcagttcttaaaacgaggaagtaactatgcagattaatggaagagactttgtagccgtttactacgagaaaggtaaagaagttggcgtagcacaagtgtcttatggcaatggtaagtggctatatggaacaatcgcagtagttggaacaagaagtgatacaaaaacttttaaagattgtgttgaccttcttgaagaatccattcagaatcattggtgtctgatatggatgactgacaatgaagtgatagaacgcttcaaaaagattgatatcaacattgatagtattgagcatgttgatttatatgagctaactgagaaggtaaactatgagagtaattctagccagagataaaaagacacggaaactcatccggtcagcagtattcattggaagaaatgaagtcatcccgtttacagcaaacgatgtgatagcctacaggaaaaacttagtatttagtgattgcttgcgtggcttcatctcccaaccgttggaagactttaaaagccgttgtggtaaaggtatcatcattcaagaggcaattatcaatggctgacttctgcaaagactgttctatagaaatgtttggacgtgatacaggtgacttaaaaggtcttatcactgaagatgactttaaagctggctacgcaatgccagtaatctgtgaaggttgtgggtgcatctgggtagaccacgaaggacagcgtgtaaaaccttcagaagataaagaatcttgggagagatgttaaatgggtattgtaaaaatcatcaaaggtgatatctttgatgcctttgataaaggcaaatttgatatcattggtcatggttgcaactgtatgaatttcatgggtgcaggtattgcagcaactatttctaagcgttatccaaaagtgtatgatactgacacagaagtttacctgtttgcaggtggcattcgtcacaaaccctgtgaaaatttactaggtaatttctctgtagcacgtttaaaacaaggccgtatagctaacctttacacccaacttcatactggtaaagatgcccgatacagtgctttagagtcatctttgaaacagcttaacagatactgtgaagttaaccagttgaagaaagttggtctacctatgattggtgcaggtatcggtgggcttgaccctcaagctgtcacagttatcattaatcaggtgatgaagagtgtagatgtttatctgtatgtctatgaagcaaaaatgtataatgagttacactcaggttggaaaaactactgtgaaccagaatactttgcaggtgtagttgtgttcacagataacgaagttaccctcttcagacgaagaaaaggtaagatacatcaaagtaaccctccggttgaaaagatgtctctgagtaacgctctagttacccacctgtcgaagagcaatcacaggattgcagtaacatttggcagtgatgcagatacttatatctatgcaagaactgatgaggatatcgagacagttttctcttcgccagaagttaccttcttagacgcaaagaactaagaaacttcgtaggatattcacaatagactaagcctttcttatctggtaaatttttcaggtaaggagggctttttcatttcagaattgtgcaggtatatttctatagagaaatctgtagaggaaattttgaactccaaagagaaaattcattttcaaactgtgcaggtaatctccaaagggttttttcattttcaaaacgtgcagagaaaaatcaggtcgggcaagaaaaatcattttagatttgtgcaggtaggtttttatagagagccagaccaacccctctccccctcttactccccctctccccaaaagtcaagagaaaaatttgtagcggattgaaaaataattcttgatttgtgttctgttttgtggtagtcgtgtgcgcccgtttcattacagttttgccaaaaatatttttaaaattttttcttgactctttgaacgtggttatctagtatttgcatcaacggggagggaatgaccttccccactaaataaagtcctaaactggagattcaaaaatggcatatcgtgcacctaaattcatcaacaaagacaactttcgcaacgcactggagaagtcacttgatgaaaattttaaaggcaacattatcgttgttcacgcattcaattttaagtatgatgtaaacgggaatagaatcaaccatta

SEQ ID NO: 196 - DNA, 88750 bp, Artificial Sequence
  Synthetic polynucleotide
acaaatagtgaagagataaaccaggttgagcaagaaaaatctttttattgtagtgcatatagatttattaagagggctagaacacatacgaagatagccttatcatcaatttatctaagaattataccaaaatttttagcaaaaagcaagaaaaataaaagcctgatctgctgagatcaggcttggttgattaatcctctggattaacatccaggaaatttttaatagcatcgtgcatagtttctttacgaagctgacgtccaatcaaaatatgaataggttcgactcgaccattaggtacttgatttgtgttctgttttgtggtagtcgtgtgcgcccgtttcattacagttttgccaaaaatatttttaaaattttttcttgactctttgaacgtggttatctagtatttgcatcaacggggagggaatgaccttccccactaaataaagtcctaaactggagattcaaaaatggcatatcgtgcacctaaattcatcaacaaagacaactttcgcaacgcactggagaagtcacttgatgaaaattttaaaggcaacattatcgttgttcacgcattcaattttaagtatgatgtaaacgggaatagaatcaaccattacacggcaaccatgttagatggtacgctatcaagtgaaaaagctgtactgaatgcacttgctggacgtggtaaaaacctgataaaatgtgataagagacgttatcagggtggcgcatatggttatgatgatgctgtttatcatcttgaaaatatgggctatcaagtagaaaaagctggagcgcctcaaataatcggtagtgatggttacgtaactatcttcaaaattaacaaataaagtactttacaaggggcttatagttcgataaagtaagccccagatagagagatttatcaaataaagcccttaaactaggagattctaaaatgaaattatcaaatcaagtgcgtgaaaatctgagcaaattactcaacaaaattgatttcattgaaacatcaaggaatagccatgatgttatggaatggttacacggcaaaataaaaggtcgtcgtgtagtgatttgcttatggaacagttgcagggagtataaaaaacctgtattgcaagtcaatatctatgatgacacttttaaaagtccagtaaagtctaaaagcgatttattagaatcctatgagataactgtaagtggcaaagtatcacgtaaagaggaaacaccatgttaatgactggtatcactgcaatcattgccattttcgcgctatataaggcatataaagcctataatctagcaaataaggcaatcacacagcaggttagcaataaccttgtagagagctttctagggcgtctcagtgatgagcaaataaagcggctagatatgagcttcagatataaagcgaaaacctatcagataagtgacatcttcaaagatgattttcagttagtcgatgattataattctctgataaatgctttaaatgtcagtgacttaaaagactactacgctgtaattgttcaagagttgagcaaacgaaaacaaaactgttgacactggtttttagatagattaaattacacatcaacggggagggaatgaccttccccactaaataaagtcctaaactggagattcaaaaaatgttttgtgcaggtgataaagttgtctggaatgatatagatgacggtttatgtacgaaagttgttgttatcttagaaattgattatatcactggtgttgcaactgtagcagataatgatataatctttgatgtcttaattagtgaactgtcaaaataaaatccttaaactaggagcttttaaaatgtatactactaacaacggtcgtactttaaatgtcacactacgtcactatgtgaacggtgtaatgcacttcgaggatttacaagctgaacagcacattttggattggcaagttgcaggactccaaaaaactgctacaggatacgggaaaaagattccaaccagttggaaagtatactacgaaggacgtttgcgcagaatttatcaagatgtgcaaagcaatagcgcatcgagttacattatagtaaaaggcaaaaaactgcatttaatgtaaagtactttacaaggggcttatagttcgataaagtaagccccagataaagagctttactactcaatcctaaattggagaacttaaaaatggctattaataaccgtgaattatcaattttaaaagcacgtttgaccgtcaacaggattaatgttctgacatcatcagcgcctgatgaaacattgcacaacattatcgggaagattcaaagtgttatcttagacgttgaaaatgtaaaaagttcattggctgacgttgcatcaggtatcacgctagacggcgcgcaatatgaaatgtcagacatgttaggcaaatctaaggtaatgaataaagagttagatttgaaaatgttccgatttgctgttaaagtgtggttatctgtcgagtatgatgctaactttgcaatcgctgactttttcgccacttggttgcagcgtaatttgtcaaatcacgattttcgtaatatctgcgatgcaatttatgcagaactctaaaaaattgttgacacttatttttagatagattaaattacacatcaacggggaggtattaaccttccccactaaataaagtccttaaactaggagattcaaaatgatgaattttttaaatatccctgatacttgccgactgttgacgcaaccagaaaatttaggcaaacctttcctgtaccatatgccagacaatacaccaaaaacatatagctacacagttaaccgctttacgggttacgctgcaaaaaacggttacaaggttactactcaaaaagtaacgctatttacaaatatcgaagagcttccaacaatcgctgtaaaactaatatttacgaagaagacgcaataaagtactttacaaggggcttaaaagttgatatcttaagccccagataaagaactttaccactaaatcctaaactggagattctaaaatggctattattaacggcgtatctatcgagactgtacacatcaaagacattaaagccggtgatacagttctttttcacggcgtagaaaaaactgtcactgcaaaggatattaaaggggattctttcatgggtaggactctcttcggtgattcttattgcttaggttatcttgcagttttaaaagttgtcaaaaataacaaataaagtactttacaaggggcttaaaagttgatatcttaagccccagataaagaactttactactcaatcctaaactggagattcaaaaatgaaatgttttcacggtactactcaagaaaatttcctcaacctgattaataacggtgataaaccatcaggcgcatggaattgttcggatatggacggcaatttttacgtgtatccagaaaataaaatctatggcgacgatgaggaagaaatagcatcagagggcattcagcaagctctaggtaatgccactatcaccgcagcttttcagatgaagactcaaaatattgttatcttagaactcgatattccagaggatgagctaaacgatgattattcttgtgataatatgtcgagtgtagcaagttttacagagtactttgatgtaaattggattaaaaaggtctatacaacagagtttaacgctatgtattcacctttttgtcttccttcattggataacccaaatttaaactatcttgatgagtctctggagcttcttgctaaaagtgttcaacagtcggacagtattcaggttttttgtgacatcatggatacactgacaggaaacattgcagaagaggatttaaagagctttttctaaaaacctatgcaatcaccttataaacactaatcagccccttgtaggggcttttagggggcttaaatcatgcttacaaccgtttaccttatcctttctatttgtaatggccattcatgtgattttaaagggcttgaggagttcacaggaagtaaagaaaatgctattcaagtttgccagatagcaaggcaagactatcccgcaagtgatgatattcagtgttactttaagacagaagatgacgacggaatctatttcgatagtgttgatggtcagtatgagattatcattgaaaaagactagacaagcctgataaaagtctgtaaattgtcaatcaacggggaggaaatgacctcccccactaaataaagtccttaaactaggagattcaaaaatggcttatgtaaccgtaattaccgataaagctggcgcatcttggtcaactcaagtaagtgataagatgtcacctatgcagtgcctaaaatactttgaacagtggaataaaggcgaggacacaagcccctttcaagtgatgcagattatccatgtagacaacgaagggaataaaacgacactgaatagtgagtactatgcaagccgttttgaaacgagaagtaaaacaatgaagcttttacgtgaatccggttatgcccatatcgccgcgttaatctgggatgacctgctaaaaagtcagcgtatcagctatgtaaaacctgaaaaaatattcatcagttaatcaataacttacaaaaaacttttaaaaaagtgttgacaataccccttgacattggtaactttgttcgagggggtttatctaaaagggattcacttaaaagactctttatagataagctcaaaaaattacttgcaatcagctatcaaaacaagtaaattactaatcaacgggagggatgacctcaccactaaataaaatccttaaactaggagagtcaaaatgaacaagtttaaagctatcaacttcatccgttcaaatgctgtaatgtctaagcctgtaaaagatacatacgaatttcgttgtaatggggtacactttgcaaccatcactaagtcagaaaacggggcttattatgtacatcgtcgtaatgttgcaaccgttgtagtctctcactttatgcaagctgtagcggaattattaccgttattcttagagatttacttagatgagtgtaaaaacgttcacaaccacgttaaaaaccttttaaacggttataaaatggcttatgaacgttctatcaagtccttaaacaagttctataaagcccctgaaaatactgtatcaatagcttatgatgtaagcggtgaaatggtcaacctctccaatgtagaacaaattggcctttatgacttacgtcctaacggttacgctaaaactctcggtgaaggtttaaccttcaatatcaagaacttagaaaaaactttaaaagatattgaaaaagatattgacgagacaatcaaaagtctgtaaattatcaatcaacggggagggaatgaccttccccactaaataaagtcctaaactggagttatcaagatggaaaacgtagaattaaccacactattgcagattgcaaccgacaaagaagatgtagcattatttcaccgtatcgaaagcgatttgttcaatggtgaaatcatcaaagaatcttatgaagttgtcggattcaaagatggtaaagcgtttggattctttgacctcgacaaaggcaacgctgttacaaagtatgatgttttgtcttgtgagattcttacaaaatacaacgaaaaaaggcttgcaacatacgccaatatgcagtaaattactaatcaacggggagggaatgaccttccccactaaataaagtccttaaactacttcctaaactggagaatctaaaaatggcaactatccgcgctactgttaacgagttcggtttttcctctctggatgttaaatttgacattgcaggcactgataacgcctttgaaatggtgaaaggtcttatcagtcagaccatcaaagattataatccttcggatgagttctgggaggaaacaaaacaagaagttctcaaggatggttatacttatcactattggggagaaaaaattgtctccctgtactacaacaaacaagattataactaatcgacgcagcggggctatttagccccagatacctgaacagcccctatttaaaggggcttttttacgtctatcgaatccttatacaatccctttccctcacctttctagaatctatccactgattcgatagaatctatctcataccttaaaagcaataactctatagtctattctatagccttttatcaaatcaacttaaatacaagcccataacccgaaagggaagggcaacccctaaaacgctctataaagctctataacagccttatcaacctaacttaagggattgcattaacctatcttaaaaagctctttacagggctttatagaggcttaaaagaatcttataagggtgtaagctttatcatctcgttagttatcttgtgaactactaaaaagggcttgttattgtcttaaaagtatgttataggggctataaagttactttgaagtagcttaaaagttacgtaaatgctagcccccttaacaatttcttaacaatccctacatagttatgcttttaagacacttgttagcaacttgttagccccttgttaaatctctgttaagaccacgtaaaagccttgtaagagtctttgacatagccttaaaagctcctgtgaagccctataaagagttatctgtacagttggggtgtaactactaggaagagacttaaaagagcttataaagagctatagagagcttttaagaggtatgtttaaggaatcactaagaaaggaaagggaacgataagaaagagatagtgaccatgttaatagctagttaaaaagattaaacacttgttagaaacttgttaattatcttaacaaaataactctttaaaattaacttgttagctcttgttagtcatctgttaagattctgtaaaacctatgtatcaactgttaagaaactgttacagccttgttagttctgttaagaatctgttaagacctttgaagagttgttaagaagatgtgagaactgttaagagattgttaaggatattttaaaattttgcaaagtacttgtaagggagctgttaagggctaccaagcagatatacatcctaatcagatatttttgagttccttcaaagaccctaaaaaatgacttgacagtcttattttataaaaattttaaaattctgaataattacctacacagtcttttaaaaatacaggtagaaacaggcttataagataccttgttagtaccgtgttagaccttgtgagataaggtctgtaaagatattcctgttaagtttgttaaaacagactatatagaggcttagtatttcctagtgaacacctatagagagtgtcataggtaacatagagattaagaggtgtataggagcttctaagaaggtgtagagagatgtttaaggtgattgtataggttgttaagaaggcttgttagaagagtgtttagatggctatttagaagggctatacagagggctattaagaccactagatagttactaagatactatatagtactatataactatatatagagagtaagattaagaaggttgttaagaaggatagatattttattcacatatgatggtgacccagaggttgggacaaccgataaaattttataaaaattaaaaagcccccgattaaggaggctcttaagatattttaaatcaggctttctaaaactgtcttcaatgatgacttagttgtctgataaaaatgagtgaatccattgttgttatcgaatatctgcatcataacagcatctcccttgattgggtacactcggatgtcatagtgaaatccattaaagacagcagaaccattacagaatacactaaaatcatccactgagatatactcttcatgacctgtgatttttatacagacacctttactcggtctcttagggttgatatcttccataatagacatactctgtccaccaagagataccatagtgaccactttacggttcttctgtttaaagtacattttaactttctgcaaagtgtcttcatagaacggataagacctttctacaaagattccttcaagtggctctttaccattttcaacttctctgttatgccgtacttcaaagataatttgttcgaaccagtcaagattttcttcggagagtgcttctcgaacatcactccagtcaagtactaggtagttaccttcaacttcttttaagttatctttttccatatctatcacaccattatcgtaaaacttgatattctggtactgcgaatttattactattgttcttgatgaggtcatcctctgaaactaaaaatgtaataccacataagtgtctgtaacgactatcatactcgaatatcttaaacagatatttaccatcatgataaacctgttgcacttcaccttctgcaacaatctcgcctgtaataaaattttttagtttatacacattaccaactttaggtactgttttcatctcaggctcttttagtgctacacctatttttgcatcaccgagtaaatgagaactctcaaaagctacgtgtttcatataagcttctgagcattcccagataaaacagtgtacaagaaccttagcagcatgtcttgaacagtttaacttatcacaaatttctgtgtacatctcatctttagtcgagttgtcaagcattgctctttgcactatctcttttactttcataagctctccgaataaccctattaagcatctctaaagtcagttttccagactctaaatgtggcataacaagctttaaagctttttcaacatcatgcacaacatctattataccttcttcataggcttctacaaggatatcttttacgttttgttggttatctttttgtggtattgctagacgcatattaaactcatttgcttgagggtggtcactaccacgccagtaaccatctttgttaaagctgatgtagtcaccgtggtaaaagtgtacaccattagctttaaacttctccagcacaaggcattgaattgggtactcagtattccactccctgactcctataaccttcactgttgcgatgtactcctgtgtttttgcatctatgatgtcaagttcttgaccagctatgatttgcatattcgctaccttctaagtttctacaaaggggctatcaagtaacccctcaagttattactcagacttttcagtcttcttgtcggatttcttactagtcttcttctcagctttctgctcaggctccttctcagaagttgccttaataaccatatcaagaagctctgataagtcactcttcagtaaagtaacaggctgctcattgtagaagtttttgtcaagataaactttaaactcttctatagaaggaaatccaaaaattggtacaggtgtcttaaccattacttagtctctccataagcatctttcaagattgccttgttaatcatttcagcgattgcaaaacgaacacatacagctataattgtaggttgcattctttacttacctcttcaagtttaacttcagagtccttaagtcgtttcttatgaactctgaatctcattagtgagatgatgataccaactaaagggacagcatacaagtaccaaacatcatatacctttgcagtaatctgtgtaatggtcaaatcttgagctatggaactgattgctgatactgccagtaatgttgccaagaaaaatgccagtaccattactgtactcaaacaacctctggcatggtgttcatgcttaatgcacttattcttttcgtcaacaactctgttgtagtcgtttgtaaagtctctgtagaatgctttcaagtattcttgagtgtagccttcaaagcaacctgtaccataccaataatcaccaccaaaatgtgctatgataccggtatctccatttggttttgttactcttagggagacatgatgaccagtcttctggtaatctatcttgtatctttcttcgtaaatcattttccaatccctctcaatcgtttgttccactcaaggtcaacaagtctttgtaggactttacctctaggtgttacaccttttaaatctgcgtcatagcaatggtaaaaatcaccttcagcgtgtctgccatagcatcttcttatactctgacttctacgatattgttctaatagagacagcttgtagtaatcttcaactgtagttagttttttcattctttcaccatagcatttctgaactgacgttgagtttctcttgtaatttcgtctggagtaaaccctgctttcagcatatctctgaaaagaacttctaagtgattcttttcaataatgtaaattgcattctgcacagatgttttaagttccttcaggttactgctaatttcttcgcacttgttgacaatctctgtatcaactttcttaaagactggcatggtatatctactaccaccattagcagcatccatgaaaaatttaaaagattcctcagagtcctttaaagcaatccctataaagttcttgtaagcacctgtgaaagctaaagattcaatctcagcagttgagtatacagttcctgcacacagtcttgcggaggtactaaatgtgtggtttggtgttatgtcaaagtctaagttcttcagtggtcgaaaataaactatcccattgtgtgagatgtgtgttacaacagcctcaacactctttgaaggattctgtttaacatacaaaataattttatcgtgttctttcactttagccatatctattctccagaaactaaaaagggaactacctctcgatagctcccatcataatcaatattgtatactcggtcaagagtattttttaggcagtaatgcactgcgcttgttactctcttcactcaacagtgcgataaattcatcacctttacccttccacggactaaatgtagggatgtgttctctgatagcatcaatcactgttttcagggcgttattttttaaccaccaatcagacactgctgatgctacaatataataagcaccatcatctgtgaagattggctcagagatacatggtgaaatcatagtggtgatgatagagccattattcatgtaatatgttcttttttcaaccttatcaagaagcttatggaggtctgcaaagagactcacaacttctttatggtcaatatctttttcaagatttgctctgtatttcagcagtgcagcatcaacctctttatcattgaatttgaagtattggacttcttcattcacacatacactgatattgttggtgtttatcgtcaatttgcacagtttgactggagaattgatgttagtctgaaaaagtgctacacagccttctacatttccgaaatgttttactaatgtaacttctggttggatatgctcatgttcttctgacattacagtttcctcattaaatactttttaagttgtgtgttaggtttctcaaaaacttctatagaagatatcttaacagactcaccacgcataccagtatgtttgaatatgtagtactctagcatccctatgtactttgctggtaagtcatgcttgacatataccgtcacagaatcttcaaactcaacaacctttgtaccatctttgtagttaaactctttaggatggttgtagttgtctatatcgtacattaaaaagagtcttttacgttgtaagtcaagcttatttgttaaagactctttaatatctgagaagtttttgtacactatgacatggagcttactcatcgttaaactctctgacgaagaaatagttgactttgttattacctaccataaggtcaaagcaggtattttcaaaaggtttgttgtaggcatcgtatgaaatatatgggtcagctacttgcttagtgcttaacttcttacttgatgtatttaagaggccaccatacagcttcttgatagcctcttctacaacagaccagataatttcgtcagtaatttcttcgtacaggtcaagttcacgctctagtgagaagtcacaaatagggaaaacaacctgtactttactcattaacgaataacctgtgagacttgaattgcttcagttactgacaagtcacctactttctcttctttgataaaagtgaatgtgagttcaacaggttcttgctcttcttgctcaactggaatgccattaagctcatcgcggattgattgagttgtccagtcttctccaccatctggataatggatggcgtaaagagggaactccatatcataccagccaaatacagggcaaccatctgcatcatctcgcattctgcgaagtgtgctacctgagcctgtaaagcgaagactaatatttccattacactcaaaaatcactgcgtcggcaagtccagcatcttctcgaccatcatggccaaaagtgtcaacttttacttgaatctctttattcataaaaacctctctctgcttgttctatttttgctcttaaagcttcgcaatgttgtaaatgatatttagcttcttgttcatgtgttgctaactgcctttccagaacagatttatagtaacctgcaagttgctcttttgtcaatgggtgctctgaaataatatcaagtccactttcaccaagagggttgaattgtccatgttcgttgacattgtaagtctcaaacttgaacaggccattgttcacagactcaataggtgacaactcaacaagctctacagtaaaccgtgtatataccttgtcacctcttgaaaccacattgttcccgacaatgcgtacaagcgagccattacgagtgtacttaaaagttccaaagtcactagcccaaagtttcatagctttctccttagaaaataaaaaaggctcccgaaggagcctatgaagatattactttggatatacactgtcaagataaatgtcagcttccatcctacgtctgtttttcaggccgtttgaagtgaccttcttacctttgactgtaactttgttccaccactgcatagcttctgcacaacctaccttattaccatcgttgtggcgcttgataaatgttgagtcctgcatagctgtgataccgatgttgtatgtttcacttacaagtgcatcgaactcattctgagaagttggaaccttgatagctttgttcactgctgcaacgaacttttcaacatccgcgagaagatactgttcagcttgttcagcggtgattttcattcccatcttaacaggcttaccagcaatacggatagtcccatatccaattgtagggattccagcagaatcttcgtaagcctctagcttaagaccttcaaagaacttaatagcttctaaaccttttcttgagagttgcattatgcctcccctgctgggttaactgtaactgttgctgcattggatgttacagagccacctgcaccagtaactacacaggtgtaacttcctgcatcagcagtggttgcaccttctttggtgtaagttgcagtagttgcatcgaggatgtcttcctcacctttcttccattggtaacctgtcgcacctgttgccacaacattcaacgtcaaggtctcaccttcagtgatttcttgattggttggctgttgagtgattactggaagtgcatttacagtaactgtggctgcgttagatgtgacagagccacctgcacctgttacaacgcaagtgtatgaaccagcatctgttggcagagcaccagacttgctataggtagcatttgtcgctgaaggaatgtcagagccatctttcttccactggtaacccgttgcacccgttgcagtcacttccaagctgatgtttccaccctcattgatggtctgactagaaggttgctgtgtaatcacaggtagtgcgttaacagtaactgttgccgcatctgaggtaacacttgtcccagcctctccagatacaacacaagtgtataaaccagcatcagaaggtgctactgactgttttgtgtaagttgcagaattggcactagggatatcctcaccatccttcttccactgatatccagtggcgttagttgctagaatgcttagagtaagtgtgtcaccctcattgactgtttgacctgttggttgctgagtaattgctggtggcttgatagcatccttcagcttagcattcaacattgagaacggattaactcttgccaaccattcacagtaaatagtgtcaacatctttaccattgatgattgcatactgcaaatccatgaagaaatcagcagttctcatctgtgcaccaacactgtaaaggagttcatcactaaaaggaactttatagtctggtttatagtcaaacttctcaacttctgcaatatcagcttcaggccaatacgagctataggtaagtggtaaaatagcctcttgatatgttctaaaatcatacctcttaccagcctttacgtttgcaacgaagcccttcacaaactctttgaagtctgggtaagtctttgctttaatcatttcttttcagcctctaaatgtgcgtttagtctaaaataacctttgtgattcggagatacatcaccaacaacaatacctttaaccttataacctttaccaattacatactgaatatccataaggaatcttccaagaccaacaatatggaacattggatataatagattctcagagtctggaatattgatttctggtttgtaggtgcgttgttcgcttgttggtgtaatatcttcttcgggccatttactgagtctccatgtcaaaggtgttgggataacatcattaaggttgtacctttcaccattttgcacggaattgatataggattgtaggaagcaataaaagtcttttgcactcttagctttcattaaatatccttataaatagttaaaggggcatcagcccctattcacacttaagctttggtcttaagtaggttcttaagttttttaagattcatactctcatcaaacttaaaaccaaatccattgacataatcaatgaactcggatttcttactgagtgacaatgcgtaactcatatcaaagttcttacttgtttctgcgtctggactagagttcacatcaaatgaaatttctgtaggctcttgcttactttttctcatattatcaatcaacaaacatgtatagtttgctggatagaaatttacactaccatcaacgtagctgtacttattattatggataaggttggaaaataccttaaggaatgtttctgagtcgtggcaaacaagtttgaattggctgctctctccaagcgcaactaatgagtacggactttcactatcaaagtcataatttggattcgatgacgtcactgttacacgcatcaagttattagcaatagtcttctgtttaaaagaattttgaacatagtgaagacccctctcacactgattgactagctctttaagtaggtcatttgcatatggtgagttaattgatacagagccgtcactattgtaattaaaacttactgttaacatttttcagttctcctgcgatttataattttgctgcaatagagaaacgaagtaaactcactggaagaaaccactaagtgttgttcactagattgagccattgccctgaaatacattccagtcaaagcatcatagtgactattctttccaattgaggttatatagccatgactctttgcagtttgatataaatctataatatctgcgatttctaattgggaactacacatagataatcctcttgtcttctgtaattttgaaagaacaggtacagaccaatttcagaggatgaatagtagattaactctaccctttttgattccttacagtgattggtattcttacctttcttcggtttatttgattttctcattaagtctcctttgtagaacaaggcagacctacagctttaagtaagatggtacagtaatccatacaacaagtcaagaactattgcaagttaaaaaagttgttgacaaagtacttgacaaggtgtaggcttataaatacttagaagataacttaaaaggttcctctaaaaaggctatttaaacagatatctttctggatatctatcttttatcttaaaagccttttaagaggtcttataagaggcataccaatgaaaaacagaacaaacaaaggccagtttaaaaaaggccagtctggaaacccatctggaagaccaaaaggctctcgtaacaaaagttcactcgtaaaagctcaactgaccattgataattctgctgagtttgctgcaaagttgtttgaagcgattgttacaagggacgctgctaagcttgcagagtttgggttaaacacagacgacgtaaccatcaaaagcatgattgaggtcggtaaaactatcatgacccactcagcaggtgaaatgaaagcaattgcagcagacactaagaagactcctgataatggtggtcagtctcagacagacaacaaaccaacgttctctgctgttgcaacccttaaaaaataattttaaaagatgttgacagactctataaagttgctctaaagtctgtcacatcaaacaacaaatgagagaagagagtaaaatatgagcgaattatttaaacatgcgcaccttcatgcaggtcgaactgaaaatggtgctgtaaaccatacttcatcaatgtctgctcttgtagacttttacaaagctgctggttcaagccgtagcaatgtagaaatcttaccagacctgttctacaaagctttgcgtgaggatgttgatgttgcagttcgtattttgcttcatatgcgagatgtacgagaaggtatgggtgagcgtaaagccttcagaactgttttgcttcaagcaattgaagacaaagttttagagtctacgcaggttcttcgcattatggataagattgcagaacttggtcgttttgatgacttcaaaatcttcgtaggtactcgtttcgagacagatgccttcaaacatttagaagcagcattactagaccctgcaacagcaggtttggcggctaagtggttaccacgagtcaaaccacgtcataagcagtttgtaaaacgtttctgcaagtttgccaacttgagtgagaaagagtaccgcacactgttgtctgcactatctgatacagttgagcaaaaaatctctgctaatgagtttggtaagattgactacagcaagattccttcacttgctgctgcacgttaccaaaaactgtttaaccgtaaagatggagagcgctacaaagcttacattgagtccttatcaaagggcgaggctaagattaatgctggtgctgtttacccatacgatgtgattaaatctgttaagtatggtaatgcagatgttgctaatgagcagtggaaagcactaccaaactggatggcagaaggtgaaaacatcctatgtatgactgatgtttcaagctcaatgtcttgggtgaattttggttcaatcactgcacttgatattggtgtatcacttgccttgtatgtagcagaacgcaatacaggttgctttaaggatgagttgatggtttattcaacaaaccctcatttcattgaactgagtggtgatttacgaaaccgtcatcgtcaggtgatgcgacacgttgaatatggctcaaccaacttacaagcagcttttgaccgtattcttgagacaggtaaaagaaacaacttgactcagaaagatatgccaagtaagcttatcatattctctgatatggagttcaatcaggttgatggagctaacggtcgtacaaactttgaagcaattcagagcaagtacaaaaaagctggatatgagatgccacaactggtattctggtacttagcaaaccgtaatggtacttgcgaagtgtccgttaaggataacggtgtagcaatggtatctggtttctctccagccactttaaaagctctgcttggtggtgagaagtttgacccaatcagcgtaatgctcaaagcagtaatgattgaccgttatatctggtaaaaaagttttaaaaagggtattgacaatgtgtttaataccctttaatatgttctacatagaaacgaaatgagagcttttctaagatactgaaaaatattttaaaaaagttcttgacaaccactaaaaaataatgttaaagtggttacatagagtttgaaaagtttatctctgtttagctcagcttggtagagcgttccgtttggggcggtaaggccggaggttcaagtcctccaacagagaccaaattaatgttccagtagacaaaatggtaaagtcaccactctttcaaagtggatatctgagggttcaaatcccttctggaacgccagttttgacagaagaccaattacagcaaacttaatcttattcatctgaaggtaaatcggacaaagaagagatttggtctggtcattaagaattgcgggtatagagaaagggcgtctcacatgtctcattagcatggtatcggcaggttcgactcctgcacccgcctccaaatttacagaagaccgtttacagcaatatttattaaatttttagcggaaaaattgaaagatacggtctggtaatactaaacatggttaggaagcacataaggtatgtgcggtcgcctgttaagcgaatggcacagggttcgaatccctgactaaccgccaaatttaggagagaagcgattgctcaccgatttgtaaggtgcaagtccttagcctgaatagaaattaaatgtgtcgttatcccgtagatggtagcggtggggactgtaaatcccttgtcattgagactcggtaggttcgactcctacacggcacaccaataaaggttatgtagtttaatctggttaaaatactcccctgtcacgggagatgatgagggttcaaatcccttcgtaaccgccaattttgagagggctatttagcccctcccttaaagggttcttacgagtatcctttaaaggagcggaagaccaaatacagcaagtacgtatgatattttcaagccaatttaattttgaaaaatttaaaacttggtctggctcaacaaatttacagaagaccgtttacagcaaaacttaaacaatctatttctccggtaaagaaaaggtgaaggttcgattccttcactcggcagaggtcgagttggtgtaatggtagcacttaagatgataaacaacggtctggtaattatctttgtagataagttattaagcttacctgtgagtatgcgaccacaaagggtgaaagggtaaattctagatttaaacccaaaaaggcacatcgctacagaccttaagcaagtctgggtagcttatctacaaagataatttaatggaagtgtagcagaatggtgatgcggcagacttttaatctgacaggcgatgggttcgaatccctccacttctaccaatatggttcagtcgcagataaggtaatgcaggggtttcataagccctatgaatatgggttcgattcccatctgaacctccaattgtgggttagcataaatggtaatgcaaacggctgataaccgttagaagagggttcgataccctcacctacaaccaatttcaataaagttgttgacattgagatgtgactactttatagtaaccttagttttcgttgcgtagcgtctattttgcaaatttaaaataaatgcaaacgacaatgtttttctggcagtagcttgataggctaaacaccagtgaggtcttccaatccctcatcaaagaatttggcgtactcgcccacggtatgattaataaggtgggcatctttaagggctttctaagagagtctttaaagataattacggggcgtatctcagcggtcttctaaaccgccgttaaccgagtaagtggagtatgcgggttcgagtcctgccgcctcgaccaatttagttagcagattacttagacgacctaagcgggtcttcctgtagggaggtggtctgtatctcatgttttccagaacatgtaaataatctgagaaggggctttacagtgttgagataatacggtaagcttcgaattatagtatgggacgatgttaagactctaaggcatgagcaacggcctccaaaaccgtttcaaaggggttcaactcctccgtcccatgccaaagtcttattaggggtaggtagcggctaatggcagccaaacagtcttgaaaactgttgccactgtagagatacggtgagggttcgactcctttacttaccgcctaataagatttttaaagccaagcttcattcggatgttgctttggtatccctcgtgtattgtcgtacacactgataaaacacctagtaggtgtcacggagaagagataatatcaagctctccaaaggttctagtcaccggattaaacaagactatgcaaagaccttttaggtctttttagagggcttctaaggttattacggcttgttgtggaaccttgttgcttaggttcttagaagttctctaaaaagatttaatgggagattgacggtaattggtaaacctaccatccttagaagttggtgtttgagggttcgaatcccttgtctcctaccaaattaatgcaggtgtagcaaaatggttatgcggctgactcttaatcagtaagacgatgggttcaattccctccacctgtaccagacattggggtcatagtttatatggttaaaattcgagttttgcaaacttgggaactgagttcaattctcagtgactccaccaattagtgcatccatagtttaaacgggaaaattacagtcttccaaactgaggttgagggttcgattccctctggatgctccaaattaatgctgctttcgtataattggctattacacatcccttgtaaggatggagatgcgggttcaagtcctgtgagcagcaccaattcagaggtcaagtgaaagaccgctttgagtcaactgaagaccgtaacaaattccacggagttgagttagcggcacaacttcagacctctttcacactcgcttagtttatatggtaaaacatcacccttacaagatgaagaaaaaggttcaagtcctttagtgagtaccatgttccagtatcccaattggtagaggatgcaagctcaaaccttgtactagtgacggttcgaatccgtcttggaacaccaattttgcaggattagttcaaatggatagagcaacagtctacgaagctgttaataggggttcgaatcccttatcctgcgccaatttaaagaggctatttagatgagatacttaaagtatgcttcatggattttcttagctttgttagagccatttgcagaaatcttagcagttatcttagcaccttttgtagttccattctacagtgagaagaaaggccacttacctttcggatttagatggatggagacatatgacaacccaattgatggtgacgaaggtcatatcgaacgatgggctaagattagaaagattggtaagctgggtgtctacatgcagagagtcggatggctctggagaaacaaagcttataacttctcttaccatgtattaggaagagatgtaaaagatgttactaagtggaaaggtaatatcaacgtaagttctgaccctgaagataatcagacaggttatctcctaatgtggaacagtaatgcttggggattattcgcttttatcccatcaattaaagtctttggtaaacagttttactggagaatttatattggatggaaactaaaaagtgttgtcccagaagaaagagcattctcaaggggaagagttatgttggcattctttattcatccactaagaaagtaaagatttaaaggggattagtttacaaggttaaaacctcggtctttgaaatcgaagaagttggttcaattccaacatcccccgccaatgctccattactccaattggcagagaggccagacttaaaatctgtgttatgtatcggttcgaatccgatatggagtaccaaatttagcggtatagcataactggcaatgcaacagtctctgaagctgtcctattaaggttcaaatccttatgccgctgccacttctaagggttcttacgagagtccttaaatgtggccttatcataaatggtaatgacccatgctgtgaacatggtctatacgggttcaaatcccgtaggtcaccccaatttatagtccaagtagcttatatggttaaagcgcgtgtctgaaaaacatgagaagagggttcaaatcccactggactaccaatttcaaaggtgcttaatgaaagagatgacagaacaaggtaaggagatttttaatctcttaaaaaccggtaaagggttttctaacccacttattactggtgcagcagttctcggtggaaccgtagctgcttctacatcacttgtaagctctattagttctgtaacagaccctacaatgcaggagaaacttgttgctgctggacttacaacagtccttctaaacagctttacaacaagccttacaagcactacagcaactactaagaccctgacagactacggtcaaaaatctattgatgagttttcatcacgtatgcaggtagcaaaggggtattccaatgttatgggtgcagcaggagaacaagttggttgtacaccgttcagtggtattatgggtgttgctacagaatatggtcaaaaagctattgatacaattaacagtacactagagagtgttaacgatgtattaagtgacttacaagacgctattgatgagggtcttgatactatttctgatttagctaatcaggctgttagtaagattaatgaaggtatttcaaagattacagcttatgcagatgaagttgtgcagatgattgaagaagaagctgcccttattgcagagtaccttaaaacgaatatcaatgggttcttagcaggtatcttaccagactggtttgacgatgcctgtaaaactggtgtaattgacactattgcaacaccagaaatgaagaacgcattacagaaataaatggaagattaaccctaaaaggtaagggagcagtttgctaaactgccagtagctgagaaatcggtgtaccagttcaagtctggtatcttcctccaatttgaatccgtgacagaaatggctatgtgcctgtctgcaaaacaggtttataagggttcgagtcccttcggattctccaagttattttactctctctcaattaaaataataataataatgccctgctataagtattcttcctttcgctaccgaagagtatttttagacagggcttttttacagagttatactttataagaaggcttatacagtatgtctctgacgtacattgtggtttctccttgacggtctctgtgccgtcttttttaaggggaaacatggttaattatttggagaaaacataatgagtgagaccgtttacaaagaactttatgaagctaataaaaagctagaatttatgcagaacactatcatggcaattgcagatagattatctgtagcaacaggcattgatattaaagaagcatctatggatgcactccttgatgctgttgatgaaaagttcgaagttaagaaagaagagactgctacagactctgaataattctatttgcggaggcgcttaatggacttaaatgctgttaagcagaagcgagtggaagatgttaggaaagtcctagctggagagttggggctttctgatgaagtaaaagaaattattaaatcattcggtaaagacccctctaaattccttccaactcaaattctgactttattaagatacacaccagaccaagttcgcctcatctttaaattgatgactgataagaactatgtagcccctcaaccgggttctcaagaggtctttttaaatactaatgctgacttggttctctatggtggtgctgctggtgctggtaagactgccgcattgttaatggactctttaagatttattgaagaccctaactataatgctgtatatttccgtcgaaatacaacacagttacaaggtggtttatggcctgctgcaaagaaactatttggtaagtttggtgggattcctcatgagcagaaaatgactatcacattcccttctggggcaactatcaagtttacctacctagaacttgaaaagcacgctgaaggtcatcagggtattgaatactcagcaatctactttgacgaaggtacacacttctctgcttcacagatttcatacctacagactcgtctgcgttctggtgctgaaggtgattcatacatgaagatttccatgaacccagacagagaccactttatttatgattgggtagaaccattcttagatgaagaaggttatccagaccctgaaaagtgtggtcgtattcgttggtatgtaatgaatgatggtgtgatggtttctgattgggagagagacaagattcttgaaatgttccctcttgagattcctcaaacatacaccttcatctctggtacgattgatgataacccaattcttgacttcttagaacctaagtaccgtggtaagttggaaaacaacacccctgtaaacgttgcaagacttcgtttcggtaactggaaggctcgtgcagaaggttcaaactactggcaaagacaatggtgtgagattgttgattcactcccagaagatgtatttgatgttagagcatgggacttagcagcaactttaccatctgagattaaccctaatccagactggacagcaggtgttaagatgggtaaatctaaaaaagacggttgctattatatcattgatgtagtaagatttagagatagaccctctggagtcgaaacacaaattaatttgactgctgaaagtgacggtaagcgaactggtatttttatccctcaagacccaggcgctgctggtaaatcctacgcaacatccctcatcaggaaacttgccgagaaaggctatcgtgcaagagctaaaccaacaaataaagataaagttacccgctttgcgggattttctgctgcttctgaagctggacttgtaaaagtcttgagaggtagttggaacgaagcttactttcaagagcttgaaggcttttgtggtgatggcaaaactaaagatgaccaagtggatgctaccagtgatgctttcaacagtcttaacgaagttaaattattcaagccaccatcaatgggtgctcacacagacttagtgagaggaaacccatatgaggggcttagacgttgatagctaggtgagaagaatggcagatattacagaaacacaagaaagcttaccaccatttagaatgggtgaagtaggttctttgggtctgaaggttaagaatggaagaatctatgaagaacctcgtcaggcactaaggttccctgaaagtattaaaactttccaattaatgatgcgtgaccctgctgtagcagcatctgtaaatattattaagatgtttgtcagaaaagtcaactggagattcgtacctccaaagggaaaagagcaagaccctaaaatgcttgaaagagcagacttctttaattctttaatggatgacatggagcatgattgggcagattttattaattctgtaatgtcattctgcacttatgggttttgtgttaacgagaaagtttataagaagcgacagggtaaaaaaggaaagtaccagtcaaaatttgatgatggtctaattggatgggctaaattaccaatcagaaaccaatcaacacttgataagtggtattttgacgaagactttagaaaagttactggtgttagacagaatctgagaaatgtttcacatattgctggagcaattaatcttggagaaagaccactaacaagaaaacttccacgagctaaattcatgctgtttaagtatgatgatgaatatggaaacccagaaggtcgttcaccattacttaatgcctatgtaccgtggaagtataaagttcagattgaagagtacgaagctgttggtgtttcaagagacttggtaggtatgccaaagattggtttaccaccagattatctggatgaaaatgcagaacctgaaaagaaagctttcgtacaatactgcaaaactgttgttaatgatatgattgctaatgacagagcaggtttaatctggcctagatatatcgacccagatactaaagaggatatttttgagttctcattagtctctagacagggtgctaaagcatatgatacaggttctatcattgacagatattccaagcaaattatgatggcatttatgtcagatgttcttgctatgggtcagtcaaaatatggttcattctctcttgcagattctaagacaagcttattagcaatgtcagtagatattttgctgaagcaaattaagaacgtaattaaccgtgatttagttgcacagacttatgctcttaatatgtgggatgatgaagaacatgtacaaatcacatatgatgatatcgaaactccagaccttgaagcaattggttcttatattcagaagactgttgcagtaggtgctttggaagttgacaaagagctatctaacaaacttagagagcatattggtcttcctcctgctgatgagtctcaaccagtatctgaaaagctttctccaaatagccaaagccgctcaggagatggttataagaccgctggagaaggtactgcaaagacaccttcagcgaaagacccaagcacagcaaataaggcaaataaataatggctgaagttatctctatttcaaatgctacacgagtgcattcgtataggggtgtccttatcattactgataagttatctgtagaggctggctcaagggtcagcctttcaggttatgttagtgatggtggaatctctgacgttttcactatttgcaggttacttgatgcaccaatgagtggaaaaccgtttatttcaggaaattgtagtgaaattgttaaaattccatttgacagttcatgccttttgggtgtaaagttatataactgcgagaataaacgtatcaatgttaatagcattgaagccgctttcattaccctcgatactgcatttcaatctccaatgacagttaataaagaaacaaacagacttgaatacattttttcacaaaatgattacaaagtacttgtcaaaggtaaagtatatgatatgattgtaaatgtggtagatgaatctggtaaccattcaacagtccttaaacaaaaagtaaggtttaattaatgggaacattaactattgatggtaagaataaaatcctcgccacgctaaccccaacgactattattttacacaatgtagacccaacggcagaccctacagcaaataaggttactcagccagtggctatttatttttctgaaccggataatggcttaattgcctcagaagacacagttaatattactgtcccagcttctgcaacggtctcacactatagcttgtgggatgctaacgataaatgcgtggcaactggtgctcttagcaaacctcaattctttgctgaagaaggtatctatgttatctcttcagtctctgtagatttaaacaaatagggtgagtaaaaatgagttcgaatatcttcagacttgctgatagattattcaaccaacctttactagccactgaatcattagctcactcagcagcaacttatgtgaataacagattgctgggtgatgtccaagcagcagtaaactttgataaacccaaaggtgaagcaagaagtcttttaaaagtaaaagatgacattgctattatccctattatgggtggtttaacccatcgtatgacattcattgatgcaatgtgtacaggtggattaagctcttatgaaggtttgcgtagaggctttgacgaagctttagcagatgagtcaatcaagactattgttctgcacattgattctggtggtggtgaagcttcaggttgctttgaattagcacgtcacattatggcttcaagaggccaaaagaaaattattgcttatgtagatgagttcgcttgttccgctgcatacgctcttgcatcttctgctgaagaaattattgcatcaccagatgcagatgttggttctattggtgtaattatggttcatcaggaattaactaaggcatttgaaaagaatggcgtaacaattaacgtcatcaaagctggtgagtttaaaggtatgggttcaccattccaagcactctcagaagaaagcaaagaaagacttcaaaagagaattaatgatacctacgcaacctttacaggttttgtagccgaatctcgtaatctctctgaagaagctgtaaagaatactgaggcgaatgtttattctgctcaggaagctcttgaacttggtttaattaactcaatcatgtctcaagatgatttcttaaattacttacaaggttctgaagaggctcctgtaagtttaaacgttaacaattcaggtgaagaaatgactgaacaagaaaagcaagaactagaagctttgcgtcttcaggttgctcaaatgaaagctaaagaacaggaagctgctttgtcagatttgactaataagatttctgcttctgctgaagcttttggatttgatgcaaaagaagctgcaacgactattttaggtgctggtcttgataaccctctgagtgttctgtttatgaatgctatggaaggtgctaaccagaaacttaatgaaactatcgcgtcccatgcttctgcaatggaagaaaaagaatcagaaattaccaagctgaaagaaactgctggtgctgttcttgaacattccaacgctatggaagaaatgggtaatgacggcgaagctgatttggttgaagaagaaaaagaaccagctaagaatgcttccgaagacaccgctgaacaacgcaaactggctctccagaatgctctaaaatctcttatcaaataaggaacacaataatggcatatcaagattttactaagttaggtaaaagagaacctctgaatgatatcattctttgggaacaggttaccccaacaggccactctcgtaaagagtacactccacaggcatctacagaatatcgtgtaggtgaagttctgaaggaagacggtactaaagtcgcagcaggggaagaagctcaggctgattctgtatgtatcgttaacttttattcagacctgcaactgtcttaccacggtcagttgaaagttgttggtatttaccgtgacgcagaactgaaagacatgcttactcttgagtctggtgttaatgctgagaacgtcaagaaagctctggctgctaaaggtattgatttcgtaccaactggcctgtaataacaataataagacattctggagaattttacaatgttgactaattctgaaaaaagcagatttttccttgctgacctgactggtgaagtccagtctatcccaaatacttatgggtatatttccaacttaggtctgttccgttcagcaccaatcacccaaactactttccttatggacttgactgattgggatgttagcttgcttgatgcggtagaccgtgatagccgtaaagcagagactagcgcacctgagcgtgttcgtcaaatcagcttcccaatgatgtatttcaaagaagttgaaagcattactcctgatgagattcagggtgtacgtcagccaggcactgcaaacgaactgactactgaagctgtagtacgtgctaagaagctgatgaagattcgtaccaagttcgatattactcgtgagttcctgtttatgcaagctctgaagggtaaagttgttgatgctcgtggtactctgtatgctgacctgtacaagcagttcgacgttgagaagaaaactgtttacttcgaccttggcaaccctaatgctgacatcgacgcttctattgaagaactgcgtatgcacatggaagacgaagctaagactggcactgtaatcaacggtgaagaaattcacgtagttgttgaccgtgtattcttcagcaaactggttaagcatcctaagattcgtgacgcttatcttgcacagcagactccgctggcttggcaacagattactggttctctgagaactggtggtactgacggcgttcaggctcacatgaacaccttctactacggtggtgttaagtttgtccagtacaacggtaagttcaaagacaagcgtggtaaggttcatactctggtgagcattgatggtgctggtgcagaggttggtgtaggacacgctttccctaacgtttctatgcttggtgaagcaaacaacatcttcgaagtggcttatggtccatgtcctaagatgggttacgcaaatacacttggtcaggaactgtacgtattcgaatatgaaaaagaccgtgacgaaggtattgacttcgaagctcactcttacatgctgccatactgtactcgtcctcagttgctggtagatgttcgtgctgacgctaaagactaatattcttaaggagggttatgaatgtgttatacaggcgacccagccaataaccctcttgatagagtaagaatcctctgcacagacaccaataatgatgaaattcttattgaacagtctgtgctagagtggttctatctagaatctggaaaggatgaaaagaaagcagccatcaaagctcttaaatatttactctttcaagtagccaagatgggagatgagaaggttggtggtgtttatttacgtaactcttccagattcaaatctctgaaagctgtttatgacgaccttgttaaaagctctgtttcaggactaccctatgcaggtggtattaatcagtgtgacattgatatgcgtcgtcagaatccttgctctgtcaagaaatacacagaatatggtgatgctgccagatacgaaggcagagattactgcaaccgtgttaatggcgtatttattatcgagcgagatgaataatggttaaaagggttattcaccccgctagagcaaaattagtcggggctatgaagaacttgcaaacggctaatgctcaagttgggtattttcaagaacaaggtcaacatagctctggtttttcttatcctgctttaatgtatttacaagaagttattggggttccttcagcttctggtaaagtatatcgtaggttgtttgaaatcactatgatgctaaacagacagaccttgttagagcagactaagaagaatctatataagcaacttagcagtctcaacgtagacccctcagataccttagaagcatttgcaaagaatgctcaaaaggcaattaaaagaggttttggtaattctgctatcctccctcctaacgcaccttccacagtcaagaaaaaaggctttaatgcacctcttgttgagacaggtgacttaagggataaccttgcttataaaatttctactaagaagggtattaagaaatgagactcttaaacagacacagctttgtagtaaagcgtaaagtctctgaagacggttattataatgatgatggtgattgggtagcttcacaagatattgtagaggttaactgtaaaggtaatatccagccatatatcaaaggttctgtaaagaatggtacacagattgctttaccggaaggtattagactaaccgatacaagaatcctgtatactacatataaacttagaacttcagatgatgtagagtggaatgagtctgatattgttatgattgatggtcatgagtatgaagtatttatgactatggattggtcacagcaattagcccatacatcccattatgaatatatcattattagaagggataaaatgaatgcagttagaaacagcagaacttgaaaaaggtctagttagaaccttagtggatgttattggtcacagattagctcgtgataaaaataatagaccaaacgtaattagagcttacccttctgataactcaaatgacaaaggtttaaaacctgaccagccatttattaccgtatattgtcaagatgctgcaacaccttatggttgggttcttgataagtttgttgaagatgatgtagtttgttacagaattgcttttcagattcctgtattaattacggtaaatgggaaaggtgctcacagtattatgcttgagcttaaacaacgattagagatgagttcagtcagggatttaattcttgaagagacaggagctacagtgctagacactggagccatcccaaatgactacacttatctcaatacagatttcgaaaattctgcgcctcttgttgtaactcttgtaaaaaattcagtcctgaaagatgaacgcggaagtattattgagcgtgtcattgttgatggcgagttggtttatgaagaaggacaagagccaccagaatatactatccatctagatgtagactccaaaggggtaaaataaatgtggaatccaattgttaatgtagatattacattgaacaccgcaggaactacaagagaaggttttggtttgccactattcttagcttcaacagataactttgaagaaagagtgcgtggttatacttccttaactgaagttgctgaagatttcgatgagaatactgctgcatataaggctgctaaacaactttggagtcagactcctaaagtaactcagctttatattggtagatgcgctatgcagtacactgtatcaattcctgatgaggttactgagagcacggactactcaattactgtagctgtcggtgggggaatgtcacaaccattccagtacacctcacaaggtgaagatactgccgagaatgtattacaacagtttaaaacacagattgaagctgaccaatcaattaaagataaagtttcagtcaatgttactggtagcaacggttctgccacaatggtcatctccaaagctggtgacaatgatttcgtgaaggtaaccactacagcacaaactgtgtctattgcaagcacaactgctgatacagcgtcaactgctctggcagctattgaagcttattctaccgactggtatttcattgcagcagaagacagaactcaacagtttgttttggcaatggcttctgagattcaggctcgtaagaaaatcttcttcacagctaactctgatgtagcagcactgcaaggtacagaattaaatagtgcaaatgatgttccagcacagcttgctaagagtatgtatactcgcacagtttgcttgtggcatcacacagcggcagaagattatccagagatggcatatattgcttatggcgctccatacgatgcagggtcaattgcttggggtaatgctcagttgactggtgtagctgcttctttacagccagctaataagagacctctgacaagcattcagaagtcagctttagatgtacgtcactgtaactttatcgaccttgatggtggtgttccagtggttcgtagagggattacttctggtggggaatggattgatatcgtccgtggtgttgactggttagaatcagacctgaaaacttctctgagagacttgctaattaaccagaagggtggtaagattacttatgatgatactggtattacccgtattcgtcaagtcattgaaacctctctacaaagagcagtcaacagaaacttcctgtcatcttacacagttaatgttcctaaagcctctcaagttgctttggcagacaagaaagctcgtatcctgaaagatgttaccttcgcaggtatcttagcaggggctatcttggatgttgacttgaaaggtacagtggcttacgaataatagaggtaaattggaatggctatgtatcagcaatattcccctaaagacgttgtatgtagctggaatggtattgccattgaaggctttgccccagactcatttttacgtctacagagaacatcaccacttatcacaccagttgtaggtgcaggtggtcaggttgctctgacaagaaatgcagacaagacaggtactattgagattgagctaatgcagacttctctctctaaccagatgctttctgcaattcaagctaaacaagacaacatggaacttgaagaagatatctcttctaacttcgtaatctacgacccatcaggctctgttctggcaactggtattaatgcttggttgcaggaattaccacagattgaacttgggcgtgaccagaactctaaaacttggatttttggttgtgagaagctagactacacttctacaattccagcgtcaagtgtttaataaatcctataagggggagactttaaaaggtcttccccttttttgtttcttttaaaagtattaaggaatcacaatgaaaacagaatctagagtaattaatggtaagaaagtaaatattgttctgcttggggcaagagatgggattaagatgtctatgaagctgggtaaaattgttgttccaacatttgcacagatgctatcaagtctgactgataaagataagaaagaagctccaatggttccatttaaagaccttgttgaagcttgttttgacagaattgaagaaattaaccttgaagaaatggctaccctgttatttcaaggggcaactgttgatgacttcccactcaatattgatacatacttccaagcaaactacggtgagtttattgattacttagcatttgcgctggaggcaaacttcggaagttttttcgaagcaagcattttcaaaagcctaacttctcagtaaacatgggtaatactctacagacaccactaactgatgctgctgtagaggcaacctatgaagaagcagacgagatgaaatttgtgcttgctatttatggtatggaagggtgtaaagaaacacttgaccaactctttgctatgacattctctgatttattatcattgagacaatttcttgaaattcagaggtcgtataaagaggaaattgcttacaacgaacttagaagagcaggaaaaatgtaatggcacaatatacagttgatagcttcattgtggaacttggtttcagtgaaaaggttgttaagggcttgcaaagagttgagaaaatgtctatgcaagctgctcagcgtattgagcgaaatatcaataaagcctttgatgtgaaacctaataaaagttctcaggaagcacttaatagaattgtaaaaaatgctcagtctgcttcgggcagaatcaataaagcactcaacagttccttgaaccttgattcacaaggtgttaaatctcttaagaaacttgaaactcaggcaaaaaagactgcaaaaggtattaacaagtcattaagagatgctatgaaggttgacggtaaaatcactatcaagacagggagagggagaggtggacagagtatccctcctgttggtggtggagcacccagaggtccgagagtagatgttgctcagagacaaatggaaagaatgtttaacaacaacttctattcagggttaacccgtagactggaaacaatcggtggtcaaggtaaccaaatggcagcctctttcagaggaagcttgcaaaatatctataacagatataaaggtactggtaaggttggtgagtatgagatggaagttaaaaagctcatcgacgtaaccaaacgttgggttattgcagaaaatgctagactaaaatcagttaaagaatcagcttggctacaggatagagctaacgcatcattacgtcaattagttggtggatttgtttcagcttatgctttactggaactctcacaaaaaactattgaagctggtgtaaaaagacaatctgcacaattagcctctacagctatctttggagcagacactcagcaagctagaatgttcgctgcatcattcgcacaccaaattggtcagaactacacagataccatgaagcagtactcaaactttgctgctggtgctcaaccaacacttggctttcagggtactcaagagttctataagaatgctgcaatgtttgcccgtatcaggggtgctactgatgaagacttgaaaggtatcatggttgcattccagcagatggcgtcaaaaggtaaagttcaggctgaagaacttcgtggacagttaggtgaccgtttagcaggtgctgtgcagctattcgctgatgctattggtaagaccccacaagaacttgataagatgatgcaagacggtaaacttcttgctcaagacgttcttcctaaagtatctgaaagaatggctgaacttgtcaagcaagcaggtggtatgaatgctgtgtccaagcagactgctacatcaatgggtcaagcgaaggctatgtgggataacacacttgtagcactgtttaacaattctagtgagggcatttcacagttatctaactccgttgcaatgttcttgcaaggttctatgggtagcacgcaggctttaggtcttgtgattgggaacctgttaaaaggcgctagtaatctacttgacttcattacagacttcatgtacagaacatctgcactatactactatgcaagagcttggtataaagaccttgacaacagccagcaaaagcttatcaaaagtgctggtgaatttctaggaacagttgtcacaattggaggcgcagttgctgtagtatcaaaagcagtcaagctcctaagtggtttggttggtggtggtatctttggtaaaatcttacaaagacttggtgttagtgcagcaggtacagcagcagccggagaagcagccgcagcagcaggtggagttacagcaacgagaatggcacttggtactgttggttcagcattaatgctaagaggctctacagacccaaatgctgctaaaaactacagtgaagttacattaccaaaaccatttgaaaatgctgttgcaaatattacaaacccaaaaaggccaatgttctttgatgagaatggtcaacttcagtttgcacagtacactcaagacgttgaaggcaacagaaagttaattgataatggtctatctaattgggagattatcatggagaagctatcaacatctattgataattttgccaataagtttaaccagacaccaatgatgatgacaccttctggtttacctatgcagactaaacaaaccctgaatgttactttcaatcttgatggtaaacaaattgctactaagatggtggatattactgacaagaatcaagaagacattcttctaagttcaagctatccagaggaagaataatgttatgggattctaatatgcaaatcaaatatagtggcaaagacggcatctatttccacttaagagataatgtagatgccttcttaaccttatcagcaactgaaaatatggaatttgacagccctatgcaggtaactacacagaacatgcaatcagggcaaaccgtcacagataatgtgcaaagagcacccagaacaatcactattagtggtgtcgttgtagttggctatgaaggaagcttattattaactcgtcagggtcaattagtagaaaacttcatcgacactcttgaaagctggcgtgaccagaagcaaattatttcagtcatctgtaaagacggaattaaaattgatgattccattatcacaagttttaaagcctctaaagatgttggtatttcaaatggtctaagaatccagctaacttttcaggaaattaactttaaagctatcgtgggacaaactgatatttctgctgcaactggaaagaccgctaccacgaatgatggtggtgctaccagtaaaaagaatacagggaataccacaacaagtctaggtaatgggaaattaaactgtcagttattattcgaccttgatgccaatggagtaagggaacttactagtgctgaagataatgcccttgcaaaatgttccatgtctgcaaaaaccagaaaaggtgttactacattcagtgaagaggctgagaaaaatgccggagcagcattaaacagaactgctggagatggaaaagcattacaaaagcattcagtgaatccgaataaaaaggggacttattaatgtcacaatatattcctgttcctgatacaggatggtctacacaaactgtaactctggatggcactgtctttgtaattgaattaaagtataaagagaggcttgacagatggttcttgacgctatctgatgttgatggtaatgtattattatctgaaaagaaatgccttgcagaccaatcaatcacaggacgctatgtaattccttcattagctggagagctttttgttgaacgaatgtatggtactgatttacagcctaccagaaataacttcggaagagaaaaggcatttgagcttaattattacactcaagaagatatgagattaatggagaacttgtaatgtctgtaaaagatagcactgctggggcttcttttaggtgctatcaattggctgtaggtagtgaaactacagcctttaatgataaacctacaagccatgctaaagattctatgcaaatggactattttgacaacttacaatttacttgtaatgtgtcttatacgtctcagaagaataaagtaacctctgatgataccacttttgaaatctacaaccttaataaagagatgagagccaaattcaaaaccgttggtgcaacagttatgcttagagcaggttacactactggttttaaaagggacgcaaatggcgaccttattattgaatatgataacctcccattaatctatctaggcactattgaatatgcttatacatataagcgtggtgttgatatgattacaaaggttatctgttccaatgataaaatggaaagaaccacgattaagacatcaatttcttataaagcagggacaacgcgtaaaagtgtgattagagatttagtcaacagactaggtttctcacttattgatgaagacctttcaagtattgatagttacacttacaagaatggttttagtgtttggggaagtgttgcagaggcacttacaaaggtttgtgaagaaagtagtctacgttggtatacatttaacaagcaaatccgagtagttccttttaacgctaaggctagacaactttcttgggaaatttacccatataacgttattgattctttgcaaggctactacagaagaactagaaaggttctgaaaaaagagaataagacagttattaaagttaaaactggagttcgttgcaaaatccatttagatgggagaattaagatgggtgataacatcactattagggaaagtgaagattttgaaggtcagtatcgagtaaaaggtctttctcacaatcttgactttactggtggtgcttggacaactgaactagatttagagaaggtggaataatgaagtcaccagttactagaatgtctgggtatgtttcagaatgtcttgatgaatttagaaaagaactgtatactggattaccagccattattcagtctttcgattcaaagactcaaacagccactgttaagccactttactctattaacggtttacctatgccagagattactggtgtacctgttcaatttccaagtggtggtggggcatctttaacattccccgtaaaaactaatgacagatgctggttagctttctcaatgttacctttagatgacttcgttgtcaatgacaagaatgttcagatggaaacaaacatgagaaggacacatgatatttcagactgtgtagctttcgtaggcatctgcacaagaacacagaattttaaaccagacccaacagcagttagacttcatttcggtgactctgtgttaagagttactgatgatggtaacttctactttgaaggtgatgtacacatttctaaaaacttgtacgtaacagaagaagtacacggctcagattttatcagtgacacgactggtgtgagctttaatgaacacacgcaccattattactggacagaccctgctggtgaggctgatactacagaggcacaataatgaaaacagactttgcattaaatctaggtggtgactatgttgccactttaggttcagattcagtgtatgtggctcatggagatttaaagattactggtaaccaaattagaattatcccagaagatgataaagctactcaggttgctcaaagacttcatattagatgccttttaagggctggtgaagttttctttaatacatctgctgggttcccatatttacaacttgccaaatttaaacagaaaacttctatctttgataattacatgaaagcctaccttgttgaaacaagagatgtatctaacatctataactattcttcttcaatggataatgctcagagaaaagtaactgttaattttgatgcaactactacaacagatattttaacagacattacgcaagaggttaatatctaatggcaggattaactacaacaggattacaaactctaagatatcaggaaatttttgataatatcaaatcaaggcttcttagagatatttcaccaaaccttgacgtttctgaggatagtcagttaggtctctttctagcttcaattgcaaggtctttagcagacactcatgaaattctatcagaaatctatgatggtggaacgattgataaagctgaaggttttaaccttgatgatattacagctttaaacgctgtgtatagatatgttgctcaagctacaaggggtcaagtagagtttactggaacaacaggtgcaacaattccgtctacaaccagattaagaagtactgctgggaatatcttctatccagtttcaaacattacattaaccccttcatactgtgttgaggctattcttgaagttaactctttacgaactgatgcaaattatgttattattattgataacgttattttctcttatcagccaaaatcttcagacacaatcacagtactattaactgagcttgctaatgcaattaatggtggtattgtagcaaaagctgaagtcatcaatgatggttcagcattacgagtttataaagatgaaggcgacattattgcaagaaccaaccctatggtagtgactgctaccacattcctcacattcacaaaaattacaactatccatgatgttgttgctgaggaagttggtgcaattcctgcattagctgggacacttatcgaaattgaaacaactgtagatggtcttgatagcgtatataaccgttatggcctgacaacaggtagaaatgaagagaccgatacagaacttcgtcagagatatttagaatccctgtcagttactggtgtaggtactctggatgcaatcgtagctgctgttaagagggttcagggcgtatcagatgcttcaggtgttgaaaatgatactgaagagacaagctcagaaggactcccaccaaaatctttcaagattgttgtagttggtggtcaaaatgataatgttgctcaagcaatctgggacactaaacctgctggtattagagcttatggggctatctttgggacagcttatgacttaggtggactatctcataatatttacttcagtaggccaacacctaagtatgcttttgtaaaagtatcatactctctatataatgaagaaagcttgacaattccagaagaagatatcagagacagtattattcaaggtattaacgcttatggtagaactttgaaagttggtaatgatgttatccctaatagaatctatgggtatatttataatgtcattaaaggtatcgagattaatgaaatcaaagtagcactatccaatagccagtcagtaccacctagtgatggacagtacactacagcaagaattactgttgatggtgaccaatacactgtatgggaaagtagcaagtacaccattactaaggagtgataatgtttcagaaaattgatgatgtttattacaagactcttgatgaaaggactgttacacagtttaaagagaaattcatctatacgagtttgctgaaagctatcactgatgagctacaaacattggaagatgtttcatggcagatgcacactgaaaggaatatcaggaaggctattggacagcaacttgacaacatcggtgcattaattaaagtaccacgaccacttggtgctgatgatgaaacatatagagcaattctttatattcagatttttctaagacgttctgatacaaccccaacatttttacagaatgctatcatgactctgtatgatgcaacattttcacagctttttgaacatattacacctatgactgctggtattgtggttagagttaacacaagaaataacgttgttgacacagcatacacattagcaaaaattgctgcaacaactattggttcagcagtcattctaagagatgtaaccctgaatggtactgcttggacacctgtagaggttgctgactctgctttagcaattgttgatgataaagataactggcttgttacagatgctaacaagggtctggttaccaacaatacaggaggttctttagagaagaacttactagggagtttagcagatgctggtgtaagagatgcttatttcaagattgatagaacggctaatagtggctcagtagattacttgaaggttaataaaaattataatgctacagacaactacatcgttggtaaagaaactgtagcaggtggtgattatggtgttatggctgaagtagctcaaatcatcaaaggtagaaaagataaatcacagcaagaaggaagttcttaatggcatttttaaattggtctacagatgaagtagatgctgatggtaaccagctaaaagtattaccaccaccagaaattcaggcgactggtttattaagaggtgaaccaatgggtcgccaatggtttaattatatcttaaactatctcctgaagaaagcaaatggtactgttggtgaggtaaggtcttttgccactgcgcaaccagatttggtggctaatggctggaagcttattaagaccgaaacaggtactgcatcaacaagtacaaaaaatctttatacttatgaatttgtaggagcttaataatggcagtaggtgaaattcaaattagtgccttgcctcaagcatccttaccaattgaccttagtgatatcttccatcttaagcagggtattgaggataagaggtgtactcttgagcaattacttgctccacacgcaagcctaagaaataaccctcatggtgttactaaaacacaaattggtttagataatgttattaatgctcttcagttagtcgctgcaaataacttatcagatattgttaatgtagctgaggcaagagcaaatctacagattatgtcttcagaagaggttaataaccttgtccagcaacatatcaaggacaagagtaacccacacaatacaactaaggcacaggttggtttaagtaatgttcagaactggacaacatctaatctgtataacgaagatgcagataagtatgctacagcaagagcagtaaataacttgtacaaggctgttcaggcttcttatccagtaggtactatccatctttctatgaactctgcaaacccttccacatacttaatttgtggaggtacttgggagttagtttcaaaaggcagggcattggttggctatgactctgatacaagaccagcaggttctgtatttggcgcttcaactgtcactttgtcagttaataacatgcctcagcactcccactctgtgtctcttagcggtggtggtcacactcataatgcaactgtgtcaatttcagcttttgattatgggactaagactacaaactcttttgactatgggacaaaagctactaacacaactggtaaccatacacacagtgtgtcaggtaacactagcaccaatggtactcacaaccatgatgtgtatcctagagaaaatgatggcactggtaatgctgtggctgactctgatggtggtggtgcaagaaggacatcaaggacttctagtgatggtgcgcactcacacagctttaacgtcacatctggtgcatcaggtgaccacagccacacggttggtattggtgctcacagtcatacagttggtattggttcacatacgcatagtggcactgtaacagtttcttcttctgaacatacacatagtggcaatacaaatagtgttggtggaggtcaggcagttaatattgaacagccatccttcgtactgtatgtatggcagagaacagcttaatttctttacaggggctttatagccccttttaagaggaaaatttataatggcagattacaaattgagtgagctaaactcaatcgacacaatccgttcagatgaccttcttcatgtcagagttaaaaagagacctaaaatgctgggtgatgaagaccgtcgaatgacctatcaagatttcttagcatcttttaagcttgaaagatttgttcagattgctggtagcactatgacgggtgacttaggaattgttaagctactttacggtggcaaggctgtattcgaccccacaggctcttctgagattactgttggtgatgttttaaagacttttaaaatcaacgcaaacggccttaaactaactattgcagacgcttcaaggtcggcaactgtttatcatactttgaataagccaagccctaatgaacttgggatgagaactaatgaagagaatgacgcaaggtatgcaagactagccgtgaataatacctttagaggtactcaagctatcctctctgacaatgaagcgctcattattaaaaatatcactcaaggtgctccactctatcttcgtggtcaagatgcagatggtactaacagatggtatctaggtaatgataataggggtacaaataatcttgtattgaagaatgtaaagtctgacgtttcaattgctattttagagaatttggtgacagtcaacaaaacagtcagaatcactggacaggtgcaaccttctgattggactaatattgattctcgatacattccagcagctactttgagtaatcttgctaaactaagtgatgtaaacactttcaggtctgcacagattattaatcaaaatggcttattgttacagctaaagaatactacacaagatagccagttatactttgctggctttaatgctgataatgttagaaggtggtacatcggtaacggggaacaaaaaccagaaagtttcgttatccacaatgataggactgctactaccattttcatggtgaatgacttcttactgaacaaaacagtcagaatcactggacaggtgcaaccttctgacttctctaacttagatgctagatactatacccaatctgccgcaaacgcaagatatatgcttgcaagcatcactggttcggcttctgaagcagatggtggtgatggtgttgcatgggatgcaaaaacaggtctttataaggttactaacaccactggacagtcttcttcacttgtatatcacatgtttttagggactggttctacaccatctgcacaattaaagttttcgtttaaaaatggtgggatgtggtatagaacatcaagagatgcctatggcttcgaagttaattggtctaaagtttacacggaagcacaaaaaccaaccccttcagagattggtgcatacactaaagctgaaactgaccagaaaattgcaacagcaattagtgactctacagaccttaataaaatctatccagtaggtattgtaacgtggtttaacagtaatgttgaccctaatacagcacttcctgggttaacttggacgtacctgaacaatggtgttggtagaactatcagaattgcagcagcaaacggttcagatgttgctacaactggtggttcagattctgtgacgttgtctgttggtaacttgccatcacacactcatagtttctctgctaccacttcatcttttgattatggtacgaagggaactaacagtactggtggtcattctcactctgtaagtggtacaacaagtgctgctggcaaccacgctcaccacttaggtctgttattagttaatggtggtgatgctcagtatggttacacaactgttagcaacagcaagacaagaactcttgactggcttgatagaagagataacaagttccctaacactaacacaactggtaaccatacacacacgtggtctggtactacaagcggtgctggtgaccattcccactctgtaggtattggtgctcatagccacacagttagtggtaacactggtagcacaggttctggttcggcatttagtgttactaaccagttctacaagttaatggcttgggtaagaactgcttaatcccttgtatgacagacatcactgcaaacgtagttgtttctaaccctcgtccaatcttcactgaatcccgttcgtttaaagctgttgctaatgggaaaatttacattggtcagattgataccgatccggttaatcctgccaatcagatacccgtatacattgaaaatgaggatggctctcacgtccagattactcagccgctaattatcaacgcagccggtaaaatcgtatacaacggccaactggtgaaaattgtcaccgttcagggtcatagcatggctatctatgatgccaatggttctcaggttgactatattgctaacgtattgaagtacgatccagatcaatattcaatagaagctgataaaaaatttaagtattcagtaaaattatcagattatccaacattgcaggatgcagcatctgctgcggttgatggccttcttatcgatcgagattataattttatggtggagagacagttgattttggcggaaaggttctgatgactgattgttaagatggtgttaatattctttatgggtattctcaccatcttggctgatgaggtgattaaatgcctacaatcctagcaattcttctaaaaaatctaggtagcttcttctggaaactcattttatcccttctaagtgaatacatgattgagaaagtgttctttaagcttgcaagataccttgcgagtaaaacagacacacctattgatgatgagttcgtagataacttagaaaaagcttttaagggggagaaataaatgaagtggctagaggaagcttttaaaaataatattggtgcaattgtagttggtatttttagtgttattgggatgtttaccacgatgcaggtttcaagtggtaaacaagaagtgtctgtcacaacaaagttacagcagctagataattattccaaaagtaactattcagctattcgtgatttacagtctgacatgagactgattcagctagggatggagaaccagaaagttcagttagagaacgttaagggtgagaatgcaaaacttaccaaaactcttgataaattctctgacagtgtgaataatctggctcaatcagtatcagccttgcaagctattactgaaaagaacacaaagaatactgaaaaataaagtttaaggctcctttttacgggagccttttttgttttacttgcctactgacagaggtgcttcaatcttccctgcatgttggtagttgttaattccaccaataaagtcacttgcagtaagatgttttaagtcacttaaagtgttaagctgtacaccaatctcaaaagtaggtgcatggaactcttcattgttcatcagttcataaacctgcttcatatggttctgataaatctgagtatctccaaagacacctatcaagtaccgtggagtgtatccagtcatcttacaaagaacttccagaataaaaccataagacgcaatattaaatggaagccctaaaaaggtgtctacagaacgctgataccattgcaagtcaacttcaccttcgttggtgatataaatctgaaacagaacatgacaaggtgctaaagccattgagtttgctgcaatatctgctgcattccaagcattaacaagcatgtaacggtctgtgatatcacctttcatcttcgttactaaggtttctaactggtctacaacacaaccattatgaccttcaaagcttctccactgaaccccgtagattctcccacctgcatcttctaaccagtcttgctcagaagaatagttagagcttaaccaacgtttaaaatcatctgaccagatagtccaacgttctccatcattttcaccccaagtgcgataacggagttcaccaagtttattctcaccattcaggaaccataaagcttccccaatgacttgccgtgtaaacacctgtttagatgttaagagcgggaaaccagttcgcatatcaaaacgaaactgaggtggagcaaatgcagagataacatctccagttcgtgtagtacgcagttcaccaacggataaaacatggttcaggatatttttgtaacttgaatctgcttgtgacatatcaaaagtgtccttttacttgtggaacataaatttcaaaagttgctttaccatcctctgatggttttgactgtacctttgtaaatacacggttatcatacagcttctcaaagaagttttcaaaaggtaaatgcacagtggcctcttcagtaactttatggaagactgtatggaacaccacaccagcatacggtaaagcattgacaaggacacctgcaccaccaattacaaagacatcttcatcaatagagctatcaagatacttcaaaaatgctccaaatgactctttactggctttagcatacattacatcatctttgccaaagtctatgcctaagtatggtacagaatttgttaagattaggcttgcacgttctggtagaggtttactacccagagtcttaaaagtctcattacccatgactactaagttatttttagtgagtctcttaaactcttgcatgtcctgtttatgtcgaggccacggcataccagttggagtaccaaactcaccattttcaccacttgcaaagattaatttaatcattttgtaaatcctttcttaatgaaccagttgataacactcttcacaactttactacgatggtagataaaatgtggagagggttggtatgaaccataagcccagaaagcgataatttcattacaccctgtgcatcgggtactttcttcagcaatatgaccgttgactatttcacttacctcaccttgtaagtctgtacacccgcaatgtggacaacggataggtgttccatcagactcatagcagtgttcaattttcatctatttaacctcaaaaactggttcaagaaccaatataaagtctacacagtcatcttcttcatccagaataccatcaaagttcttaggtacaaagtcgaagaggctcatagaatatcggtcagaagtaaccctgatagtgttccctatattctctacagttaatattgtacggctttctgttacctcacttagaagattactcacaaagtcatctaagaagtgtttcatcagtgacttgaagcctttagggtaatctgtaccagagtatgtttcaatctgaggaacaagcttaacatttatactagtctttgttaagaacgttttagagaacatgctatcaggtagcttacaaacagtctttccagtaccttcatgttcaatctcaacaaaaccagcttcatcgccacatgtaactattttaaaagatgcttcattctcatactgtgaagccataaactttttaagcatcgttttaaggaaatctgcatgggcatcttgtaagaatatatcaatcatagttaatcacctattatgggaacagacacttgatgtcatcgtttttgaaaacaaaacttgtgtagttatgaccatcaacatccagccaaacagcctgaacatctacaccatcaagattgtggtaaagctctttgatgaagtggtctttcacaatctgactgctagttgtttccagcttaatgttcgagattgctgaacctacagccatatagcccatgacacgtttcttctcagtatgcttaatcttaccatctttgtaagccataatgagattggagagaatcttcacaccataatatttttcaaggtgagtaggtacgccataaaagcctaatgcgaagttttcagagtggataatgttttcacgtttcatattaatctgccaaccttaaattgaaattaacaccaaatttttcacatacttccaacatatactcaagggagacgttaccagtgagatggattatgttggatacacgagcctgagagataccacaaattttagcaacttgctcttgagaaagacctctggatttaatctctctcttaaaacgatgtgcaacgaagtctctcatttcgtctacatccattggacaaatataactctccatttcagcctctctatcagcctcccaatcatcttgtggggcataagggtcaaaaacctcattcatctttcttcttccgtttgcgtgaagtgtcaattaatgagtctatgtttgtagccctaaccttttcacgttcatcgttaagataatcgtcaagagccttttcaatctgtgaatcatcttgacagataactgtaaagactgtaaagccgtctgtatcgtcaattatcttaccataaccgcttctgggatgtaactttttaagagccatatcaaatacctgtgcagcttctgttttctaagaaatactcaacaccatacatagctttttgcatcaaatcttctttaaactggatacgatgattgagcatagcctgtacatcaatatcatcagggtgcttctctttaatatttgcagattgcaggaaatactctgcaagaacacgatactgatagtcagttaccttatcagtcatctctgttaaagactcttcagagattggtttaagtagttcacctttagatagggcaacacctttaacaatctgacaagtgtcttctggaacacctgataagtccacatttggaagttctgttgcattgactggtaaattcattgccataaccattgcagcagctaataaaatctttttcataatgacctcaaagttatattgaattttgtattacatttagtataaaaataagctataacacctgacttgtcaacagattttatagcttattttggcagattttttataaggctactgccatccttccataccttaccttaccacacctaaccatacctaaccaaactacaccatacaataccttgttaaaagaccctcttaaagaccttttaaaaaggagcctccgaagaggctacctagtcaacttagaaaggttttctgcgttgcttgttaatgttagctttcatagcagctaagtggttttgctgttcaattagtcgtgaacgttcttggtggctaagtgccatagtgttcacattctcaattgcttgagtagcttgctttaaagcacgaccaattttaccagacattttacgttttgcaatagttgcttgatgcttaggttcaaccacacgataaccaacacccattgaagcaaccagataaatcttctcttctttaagaagcttctcaataaacttctcaagtcggtttagacgtgtaagagcataagccttcatttcatcttcgtacttaacaatgtcaccttgataagttggcttcacaatacctaagaaggtgtccatctcagagtgtgatacagtgtcaccataactaaactttgctgctaatgcttttgtattcataattaaacgttaccttctgaaataacttctacagaaaaacgaccaaagcgtggacgccaatcacctacaccacaaaggttgccagcattttccagaaccatcaggagttcttctttggtgatttgctcttcatcgaacatcaaaccaaactctacagaccagtcacggaagattggacggtagctcataactcgtgctgtgccaatcttaacagatttagcatagataaagtctggattcttagcaagttcttgtgggtttgctgggcagttcttgatagtcattgggaagactacatctgtcagcataatggctcggtcaatcaccttaccaagtttgttgagttttgcaccagacttgatacaagcctcaatcatctcaccgttcataacaaaacctagctgctcatcgtagtaacaagaggttaccagttgactttctgctaagagcgcatagtcttcgtcagtctttttacgtttactagacagagacttgtgatattttgtcagagggtttaatgggtctgacagtgtatcagcgtggctcaggaaagggcgagtaccagtgattttgatatttaacagtttcatagcatttagctccacactttagttgattgttaagttgtttgtaaagaaccctcaacagaagactctttagaaacttggtagatttttaacgtggctactaccatccacccataccttacctaaccaaaccgaacctcacacaaccagaccgagccgcaccccgccttattaaaagaccctcttcaaagaccttttaaaaaggtaagtctcattttaatgtagctgagactaactacccatactgtaccgcacctgacccgacctgaccagaccagacctaacattaccgtgccacaccgtaccgaacagaacactgccatacctcacatcacttaaaaaccctcttagaagactcttaagtgatgctggtgagtacccgttggtttatgctgctcagtatactcaccaaattttctatgtcaacaactttttatataaaagtcctgatagctatatgtgttacaaaacagaagattgtgaacaaaacacccattgcaaaagatgtgtccaaaagcttacttgcaatgtatgacaatacaaagacaaccagtataaacagaatgactgcactgaacatagtttactcataatccctaatagctagcccgacagggaactgtaaagaacccttacgagtcatcttctggaactgaaccgttaaaggcttcccgataaactcttcaggatgctcagcaagatactgtttcttctcatgagtagtcttccatgagacatctacaaagacgttaggaagagtctctacaacgaacttgccatgaccacgcttatcagtctttacaccagtcactttaaactcttcagtgtgcatcttcttgtgcttaatcaagaagtatgaacggtgacaacactcatagaaggagtcttcagagattgaacggtacattgcaccttcaaacttagcttcaacccacttatcgtgagcttcatcaaactcttcccaagaatttacacgacgagacttaacaggaacaactttacagccgtctctaaagtcattcaatggtgaagtctcaataatatctctacgctcaggccacgtcttagtactgtcacagatatcgtaccagtaaaacttgagcaagtgtctgtcaggattgtcttcatttttaatcatggagacgatatcttctaagtcccacccatgagcataaatctctccatcaaattcatcaacatctttgtggagccttaacattgccataatgtcaggtattagttcagtagggattttgtaaacagtattctcacgagaatatgctgtaaatacactgccaatactcaagtgccttgaaatcctacaacggacaccatcaagtttcggttgagcatcagcagggaacttcagatactttgcatggctaacctttgcagcatcatgagcaagctgtacacctaccttctcagtattctgtgcagaatcttttgtgtaagcataacctttgcggtcaacttgctttttatacttagcagcaacttcaaagagagcttgctgttcagcattacgctcattctttttaccgatgttcttaggctctgctgtgtactcttcaaacatcatcttgccattttctttaccataggttgtgataactttgtcacctacagcaacacatgaccagacgttgaaggaaccatctttattttgtttgtacagaattgtcatttttaacctctgagtgataccaagtgttgcaggcattacatgcgtaaagctctaagtcgtttttatctggtttatggaaacagtttgacccacaacgacaccggaataacttaccatcaacacgaagaatgaatgtttcaagctcaccatcttctgtaagaactgcgttctgaaatttattatctttacccatttgtactctcgcctgtgtcagattttatataagacctctcactacgtcttttaatgaaatgtacaacgcattttggtgtattttttacatctttaatgtgcaacctttcgaaactgtgtactgtgaagattgcatctgtcattgtttgcttagatttcattttctcttaccaccaatttccacgtcgataacttgaacatcaccagcaacatcaaacttatgaatgatgctttccacagtgtaagtccaaccctcaatgcgaaccaattcaccttctcgcggtacgattgggttacgttgggccacggttgcagtggaataaacaacatcgtagcagtagatatagtgtactaaaacttgcatattagtctcatccatcaataacagtagtgtgtgattgaccatttttgccatatctataagatgttgttgtttgagagtttgggcatctgacaacaacaatatccctgcttatagcatccccattgagtttgtagattttgcagtcttgcatctctggagggaggctgtaagaggcatctttgttttcataagatgggttacagccagccagaaaaattactccaagtgcaaccattgctttcacacaactcttaaccttattgttcacgataatctacctctctgtatgtttttaaatagtgagtgatgagttctggtaattcactacgtttaacgtttgaacgaagaagtgtccagtcaaaacctttaccaaccctcccccagagactgtacattttcttcatagcaactccagaatatcaatacgttcacctttgagtactccagtacggtcttttgcaatcttcccttcaacaataagaatgtgtgcagaccttaaagtgtcactgttaaaggcttttacgaacttgctaggcatcactacaatacacatctcctgaatcaactctggagtatagcagttgtcgtgaagttgctgaataacgtctgcaagtgtcatttttgatgcctccaatactcaatatcaataagttcttgtgcaatgcttttaaggttacctttcaagaaaaccttctcagaacctgaaagagatgaattgtcaattaacctgttcatcctctcaaacaacttctgcttacgattcttgatagtctcttttgaagcacctttcatcatcgctgcatgggttcttccacggtggctcataagccctcctatataagatatagtataaggtactcttccatgagcaccttgtcaacttagttttgcaaactctccgtggagtttaatagcagcttcacagtaagctttatgggcttcttcaggtgtgtcaaacataccaagatgatagtttttaccttgtaaacgtatcattgctcgaaaccttttacttatcttctgtacaccttttggcaacccagatggggactctcttgaccgattgcaagagttttgtgaagctgtacaaacccttaaattcaagtacctattgtcccaaccgtctccattcttatggtcaacctgtaaggttttatcaggtagatatccatccatatacaagataactaaacgatttgcttggtaaccccttccatcaatcagcaactgaactgacttgtgtccatcagtatttgttctgtagtttccagccctcttacctccaaatctagagttaaagtttgcattaccttctctaaacttccaagtaaagacccctgtttcggggtcgtagtccaatagctccttaagacgaatttctgtaatcatttcaacaccatcaatgtacttccaaccagctcttaccaaccttgcctgtgccagttacaagcgtctcactcttcaaacctaaattcttagatgcctgaccatacatccagtcagttatggctttaacttcttgagtcatactttctgggcattcccaactgttttcatcgtggtatgccagcaaaagcctagcaccaattgctggttttcgtccatttaattttgtcaacccttcttcacatgctcttctacaagcaaggttaattgcctcattttgaatctgagcctctgaacccatgagcaaataattcaacagcttatgcggagatttacaccacaaccaagctccagcaacctttacaaaaccccctttagagattgcagcagtcttaccaaacacctcttcaagtgcctttttagttgctttgtagtcagcttccaagtcatctagcagctttttaattttaggcaaacgaataaagtaagtctgtttagtcagcgcaccttcctgagtagttgcagctttaatcgtcttagcaaacttctcatcacctgcaccgaacagcagtgcatagataccattcttagctttcttacgacccttgctaatctcatgaagaagattctcatcctgagtagctcgacaagtcaagatgtcctgctcatcgttcaagttaaagtaaatactgttcagtgtatgtgcatcagtccctgaatagacaacgtacaggtcattctcagagtcatagcgaaggtacttatcaatctctgggttgaggtactcatcaaagtgtttacagtaatagcgtccatcttcttgacgaatgaactcaatttcttctttaccttgcgttaccgctttggtgaagtctttatcacccataaagttacaaagaagaactagctgggctgagttcatgtctacagagacaacgttagtaccttcctcacaaatccacactgccctcattggttccccatagacagcagcaccagacggtacgtttacaataccatactgtgtcatacgtccagttgaagtaccaaacaccattgcaccagcactaaggcgaccatcaggacgaatctggttcaaccaacctttttcatcatcctttgagttctcaatagttctgcgtcggtgcatcaaagtgtagtatttagcaatcttctgtccaagctcaccttcaatcgtatcgtaagatgattcagtaagttttggtgaagtacggattaagcaaggctcaagcaaatctgtgtacttcttcacagaccagttatgctcaatgtactggacgccttcgtgttcaacataactcaaaccacaccgctcaaccatttcctgccacttaggatgctttgtaatcatctttttattgtctttgaaacgacaaactttgacagggcgaccatcagagtctttcttgtagttccagtcatctggaatccaaccaactgatttcaagtagtctttaacaactgctacctgagtcatacgagaaacttcaaactcaattggtgtatatggtgcatcaatcaaacctgtatagcgacttgactcaagttcaaagtggttaacaacatgactgttgtagtacttcacagttttgactgtttttactggcttccagtctttgcatttcttaccaatctttgcattcaactcgttgcaaattgcacgagcatccttcattgctacaaaaccttccttgtactcttcaccagttacagagttggttggtgtatagcaatttctcttttcaatgttaaaaatctttgtagttggcttaccaaatggcttgatttcatatgtctgcatctcaccgttacgtacctgctgacggtactttgtcttagggtacttggtaattctcttcagtccatctgcatgaccaaatgtttcaacatactcattccaagcttttgcaaactcttctccagtgactttacctttggtcttaatagttggaggtagatgcggttcaacctctgaagcaagctcattagtcaacttgtcaagttcctttacatggaactccataagctctttatcagctttccaaccattgatagcttgttgactcatccagaaagatgtttctttagctcgcatgtaggtttcataagtgtctatgccacacttcttaagcttgagatactcattatcaagtgcccgtttagttttggcgttaatacggatatcttctacaacacgagtgaagatttctgcattccacacaccccaatgttcaatctctggtttacgaacaccaacacgagcaccccatgcagccaagccatgagcacctttataaccctttggagttggtctatccatccactgaacacgagactggataagagaatcctgaaagaaattactccacggcttacactttggattatcaaagttccataaatccggtgcaatgtgattgaaaacccaccagtcataacctagaccattatgaatgcaaagacgttttgcctttaacgcaaactcaataccttcacgtaagccacccttaatgtacttggtatacttgtgaccgaggataggttcatctgtaaagacccatacaggaggctcttcatcatcagatttatagtctgcaaaagccattacgtgaactttagtgaactcaaggagtaaaccatcagtttctgtatcaccaaccaaatgtaagtttttaaaatctacgttttccatttttactccctctaaaatcattaacctcatacattactgcaaaaaattataaaaagcaagttgacaatgcacttgacaaggtgttaatctttgcgaagtgggtttttacttaaaaggttacttaacagtttaactatacagatactttaaaagtcttaaaagattatttaatagcttttaaaaagctttaaagtataacgtatagaatacgttaagataaaagattaaaacttaatagttacttaaaagaggcttacatgcagaaaatgtttgttcacccagacatagctgactttgttagagctttgcaaaagttggaagaacttgacattgctgctcaacgggaatatgctcaccatcacaggagaatggttgatatacaacatgaaatagagttgtctgaaaactatgaagatgacttaaaatgctctgtatttgagcatatgaaagatgttgctacagcgagacgtaaagctaaagacacagttgctttactagattctcttaaaaagaggttgcaaagtggtacagacctgtgtaatctagcgtcactgattaacgatgttgaaacttcttgggataggcactattatccacgttctgaaaagacacttgacttttcttcatccgaaaacttaaaatgttctagaaagaaacttaaccaactgagagagaaataatatgaatatcgatgtagaaaagatgcttgaagagaaaggtattgacgaagcatttttaatcaatgccgtagaaagcatggctatgattcttcgtggtaacaactacacagaacagtttatgcctgcaagctataacttgcctgaagacaagtctgataacggtgcttttgcagaacaggttaacatgatgctttgcgacaaaacacttgctttagcatctatcgttgtaggtgttgatgcccttgcagagttcattttttatgagatgcagaaaaatgattatattgccatgaccactgaagaaaaagacttgctactactcgcaggtaacgatgaactaattgacctgttaatttcatcaactagtgctgttatggctgctcttgagaagcgcatggaagaaaaactttcacgatatgaaaaacttgattggggtgtagaagaattaaacccacgaatcaaagaaattatccagcaaactaaagagtctttggaagaagctgttgaaaatgactctgtagctgatatagaacctcttcaggtgaaagttgcactgatgattccagctatctctacgatgatgaatatcgttgcactaatccaactttcacagatgatgggtgtaagtattgagttcattgaagagatgactggtggcgttagtatgcaagcaatcaatgatgttttggtgaacattggtgcttcaatcattgaagagaaactacgcattaacttcggtgatgattttgtgaagcaaatctcagctatggctgaaaaagagtatgctgagcaactgcactaagtctttataaatcttacaagcctccttagttgggggctttttagtaattaatggagataaaatgagtaatattatcgcatttactggaaaggcacgttctggaaaagacacctcatgttctattgtgaagaacatcttagaggatgagcacggctacaatgttgctgtaatggcctttgcagacaaccttaaactgtctgcatcaaagatatttgacctgacttggaatgacctgtatggtgaaactaaagagactccacaggtatttgacttgtcatatcctgaactgatgtttaaagttacggaagctatggagttcaccttcagagatgaacgttaccatatggacttcaagcttatgtcagagttaaccggacgattaatcatggagcttaagaaggttgctaaaccaactctattgacacgtctggggtttagcaaaaagtataaattctcatcaagacaaattcaacagatttggggcactgaagttgtccgtaaagtaatgggagacaagttctggtctaaagaccttgaaaaaagaatggttagattctatgaaagttgctcacttagaaatcaatatggttttgtcttaatcagtgatttaagatttgactctgaagctgagtggctgagtagatttgcacaccaaactattgaagtaaaaagagacaatgtggataagatttcatcacacgtttcagaaaatgggctatccaccaaatatgagcgtgacattattcataataatggtactcttacagaccttgagaacaagctaagagccatcattaaagtttaaaagagagaatgaagatgagagtaaaagacaattttaaagttattgaccaccgtttagtggaactctcatctctttccaatgaggtaatgattgaacgtcttaagagagttgaatcacgaaggaaagagattgcagatgaaattcatgaactggacaagattgaaaatggattgaaggcagaactacaacgaagaggtgctaatgtctaaaggtcgtaaattgaaagaggctggtcagtttgttggtcattgtgcatgtccacgttgtggttcatcagatgctggttcaatctatcatcatgacgatgattcttattcgatgacttgctttagttgtaacaaaggtttcccagagtgggattttgataaaggacaaatcgtgagcacttattctactggttcagacaataaaaaccgtactttccgtgggatggatttagacgatgtaaaagacaaccttgaagcaatggacttaaaggacaggaagattcctgcaaaagttcttgagcgtttgggtatcaaggttgacattgatagtgacggtgaaattgatgcgcatttctacccaacttacaaacgcaatgaagatggcaagctagagcatgttggctaccgtgttcgtcaccgttacccagaagaccatccaaaagagcacctacgcggtaagttaaaagacttttctggtggtgttggagatattaaaggtgaactggcaatgttcggttcatggattgctccagaaggtggtaaccgcctattcatctgggaaggtgagatggaatgtgcgacagcaatctatatgacttctcttgcgattaaggacaagtctcgtcgtaagaattactgtcacgtatctgttccatcaggtgcaaacatcaagtctatcaaagataactatcagtacattacatcatttgatgaaatttacttgtgctttgataacgatgaagcaggtgctaaagccactaaagaggctgctggtatcctacctattgagaaggttcgtttattccagtatccagaaggtgtaaaagaccttaatgaatggtggacaaagttctataaagagaaagatacagttctggaaggatttaagcagcgtatctacaatgcacctcgttactgccctgctggtatcaagaactttgcagacggttttgaggcaatgaagaatcgtggtcagattccattgattccttttccagaatctttcggagacttgaacaggctaacttacggtggttacggtttaggtgagattacgactattgcagcaccatcttcagtaggtaagtcagcttacactcgtgagatgatttattcagcttggaaagaaactgattataatatcggtgtaattcctgtagaagatacctatgaagagttgatggaaatgctctgtgcaatccacctgagcaaacagatttctgagattccttatgatgaacgggattgggatgaattaaagggagcacacgcagagctttcaaaaggtcgtcgcatccatatcgttgaccatcaaggggcgattgaccaagataacctgctggagtttgttgactatcttgttaacagtttagactgtaagattattattcttgaccctattacattggctctgtcacgttctgatacggatgaagaggaagtcttgtctgaactattgcgtcgttgcaaacgctaccagtatgcacaggtaaacgtttgtcacgttcgtaagagtgcaggtggtcagaaagctaactctgaaggtggagatatctctgaagaggatattaagggttctggtgcgtatttccagatttccatgaacaacattctgttaatgcgtaacaaggttgacccagaccctgttaagaaaaacttgacaaaaatcaagttaactaagtgtcgtcgtcatggtaagtcaacaggtattgctggtcatacttggtacaatccagacacaggacgtcttatcaaagcttctggatgtggtgttgacattgatggtgcagcagaaaatattcgtcaacagtttggtattggtgaagctgaagaccattatgacgactctttacctcattatgaggatgaagtgtttgaccgtgagactggtgaagtctatactgaagaacagcgtcaaagctcaacgattccacctgtattaagtgaggatgcagatgactgcccgtttgaaactgagtgatagttacaaaagagaggggttcatacccttctttgaagaaaaaagtttaaatgaatttcaggaagagtgtttgacaaaggttgataggttctatagaatgctctacatgaaatgtgatggaggcgttgaggtagaagaaaagttccatcacagtatgataacagtcactattactatacctcgacataatattggttggctgtttataattaaagaaaatgtgtttgaatatcaagtatatcggagaatatcatgaaacactctaaagcatttgaacaagtttttggggattccttaaaagccactgctggtaaaccagcaaaatactatgaagagaagcgtgtaagaactggaaaaactgcacgtaaagcagcttctaaagataagcacaacttccagtaattaatgtttgacaatagagtatcaacaaattagaattggtactcttcataaattgagatagaggtttaaataatgtctaaagttgttaaaatgaaagctccggtagagaagtacaatggtactgaacgtcaaactctgcgttaccttctgaaagatgtttggttttattacctgaacacttcaccacgtccgggaaaaggtaaatccattgataagaaattcccaggcaaagactgcaactacagtgtttcaattctggcagaagatggtaacaagctgtttaaagagtttactaagtctaagaaaaacccagaaggttgggataaagttactactgaagcagttgatgcagatgacttcgaagagaagtttggttgtaaaccaccttttgaagcagacacttactacatcttgaaagtaagtcgtgcagcagcttataaagatggtgctgtatggacagctaaacagtcattccctgtaatgctgattgaagaagtaaatggtaagcgtgtagctgttaaacagccgatgaagaaaatcaaagctcaagcatccgataagcatgaagatgacaagaactatgatgtaattcatccagatattgcagttggtaacggttcttttggtagtgtgattctttctactcacttctacacttttgagaacaatgttctgacaaaacctattcaggaacagtttatcattgatactcttgtaccttacactggtggtaacggtgctaacggtgaacctgaactggatgaagacgaactggctatgcttggtcttgatggtgttgaagataatggtgaaatcactgaagaagacgcaacagaccacaaaccttcgaacaattctgatgatggtgacgatgaagacttgccagacccagatgacgaagaagatgaagacttcgatacagaagactaatctctaaaagttactttaaagccctgtacttagtatggggctttttcatatggagagtcacaatggagaagtatacactaacaaaacttcccgattcagttacacatgtctttattgactctgatagcattgcctataaaggtgcttgtgtagttgagaaagcaaaatataaatatgtcaataaactcacagcagaagaatctgaaccatttgataatgcaaaagatgctgcaagatggttagcagaccagagaatccttgtggaagagcttggcctgacatttgatgaagatgaatgggaaagacagacttggaaagaagctaagagtgaaaaagaagctatcatggctactcagcaggttcttcaggaatggcttaaggttgttggtaaagaaagaacttgggtaggctacttaacagagaagggtgtacataaacataaagacattaaaggtcttgagcaccaatatcaaggtaaccgtaaagatgctgtcacaccaacacacttagttgcttgtcgtgaatatcttctgtcaagaccagagttcaagctcttaaagggaggcttcgaagccgattccatcgtaattgctaaagctgaaaagatgggtaagaaggctgctcttatgagtattgacaaagaccttcgacaagctgaagggacttattgtattgatatgacttatgaaaagtcaccactaatttttattgctgataataatgttggtgatatctgggattgtcctatcaaatcaaaaccaaaagctgcaaaaacagttggtgtaggttttaaatttttgtgttatcaggctgttgctggagataatgcagacaactacttcggccttaaaggtgctggcaaagtagctgtgatgaatgctttagatggtaaagagacctataaagagtgtcttgatgctatctatgaactctatgctaaaaaagagtcttacacctatgtgtcatgggatggacagactgttaccaaaacaccattagagttaatggaacaacatttctgggtagcatatcaagagagaaatccaaaagataatttctcttttaagaaatataattgggagccgtgtatgaatgaagattaaaggatttggcaattgccccacctatggtcattgggtatctttgtgtggggaagttgaccccactaaacattttggctttgtctatttagtatactgtaagaaaaccggacaatattatatcggaaagaaacagcttaatagtgtgaccaaaagaaaagttgctggcaagactcggaagaaggtagtcactaaggaaagtgattggatgacttatgagacttcttctgagtatattaaaaaagatattgagagctttggaaaagaattttttgacttttatattattcaaacctaccacacaaaaggtggtctagtttatggtgaagcaaaccttcaacataaattcgatgtaatgacaaaaaggattgactctaagctcagactcttctacaatgccaatattgcagcaattaagtttattactaaagaaacttatgaagatgctgaaaaaagaatccataaggtaatgaaagcaaactgtgcttgataactattgagagagaataaaatgtttaacaaaagtaaagctgtgagtcatgtagcaaaagttgatagcaagattgaagaacttgagcgcattcttgcaaatgccagagagtcaataattaaagaggttgaagctgttgaatctcaaatgcagcacctaatgcttaaacgtcaagagctacgtgagcatctggaatatattgaaacacgagagctaaaggttaacagatattttaaggagtcagaatgtttaactcaagagaatcagtaaaaaactggaatcttcgttgtggaaacactcaaaagcaaccctacagcaatgagtattgggaatctttgaaatctcaatctctatgtatgcttgaagaagcaaaagagcttgtaaaagcaattgaagagaaagaccccattgagacactggatgctcaggcagatttgcaatatgttcttgacggtttgatttacctgtcacaacatgaccataatggtgctatggaagctgtttgccataacaatgacctaaaatacacagacaactatgaagaagctttaaaacgtcttgcagatattgagaagcgtactggtcaagagtgtatcatcagaatgtcagtagttgatggcaaagaatggtatgcaattgttcgtgcagccgatgggaagattatgaagcaatctaatctccctaaagttcagcttggtgaatacattgtagaacttgaaagccaagaactttttgtggtagtatctgagacatgcgttatctgcaaaggtattgtatgtagcttaaaggatttgggtgtagatggttttgtagaagttaatccaattacctctaaagcagataaagatttctgtaaagagaatggactatggattgcagatattgtctactatgatggtgagcagttccatgtaacctcatacccaaaactgaattatgatgctaataacctgaagtgctggttaaaaggggttggttataatggattcacagaacattaataaagaaggtgtggctcagaagagccacttctcaaactacaatatctctatgacggtgtttatgaatgacccgttacttgagaagtatggtgagactccagatacacttctggataatgaacaagttttaaaagcagttctgtacaaatacgggattgatattgagaaagagtattcttttgaaatctgtcaacacaggaatacttttggtaaagttgtaatggctccactcttcatgggtgtagaaagaactgactatggttggttatatctaaaaagaaacttggagaaataccgtgtctaaagcaaaaaagctatcttatgatgacattatctcaggtgctaaattaggtgttgatagtatcggacaagatgttaagcacggggacacagtcatgtactgtgacgacagaagaggcagaagtgcaatcttgtttggaagagttgtgtgcaagatgcgaggtaattacgttgttgaagacatgaatgtggatgtcacaaaacagcttgaaataattatgaatagtgatatatcatggttcgtgaattgtatgcacacctcttcagtcacaaaggtaagtgataagttttacgatatgtggcagaatgagcaaattttcaagatttaaactagggagcctcttcggaggctcttttcatctgtaggattcaaaaatgattaagacaattaaaaaatcaaacggtacagtagtaagctttgacccagaaagactgaataagtgggcatcatgggcagataagcgtggaatcatctggtcagaagtcactatggaagccatgaaacgtgtctatggaggttgcactacaaaagagatgcaccaagctatgattgatgtttgtgttgataaacaaactcaagagtactcagacatggctggacggctacttctaggaattatctacaaagaagcctttggaggctttactaaggttcctacgctggttaccttcgttaaaaatatggagagagcaggactttgggagaagatggattactcacaggaagagcttgaatacctgcaaggttacatcgtgcactcaaaagatatctcttacggttatgcagtcttgaaacagttcagagacaagtatggtatccgtgatattaaaacgggaagactttttgagtcaccacaatttatgtttatgggtatggctatgaaagcctttgagaagcaaccaaagcaccgtagactgcaagatgttatcaagctgtacacttacctatctgacctgaagattaacgctcctacgccttatttaaacggtttgagggcaactaaatcaggttatgcgtcatgctgcttgattaaggcaaacgatactgctgaatcacttggtattgctgcaaaggttgcttatgatatgactacaaagcaagctggtatcggtatgctgatggagactcgcactattggtgatggtatccgtcaaaacactatcgaacacatgggtaaactgccttattacaagcttgtacgttcatctgtagaggcaaacaaacagaagagtcgtggtggttcagctaataacttctacactgctctagacccgcagattgaagatttactgcgtttgaagcaccctacaacggttccttctaaacgtattaatgagatggactactcattcggcacaaacgattatttctggcagtgtgttcagtatgatacagattggttgctattctcttacaaagatgcaccaaaactctatgacatgttctacacagcatctgctgatgagtttgctatggcagttggtcacgcagtacattcaggagttaagcacagacgagtcaaggctcgtgaaattgctaagctgtttattcaacagcgttatgctacaggtcgtgtgtatccattcttcactaacaacgcaaacacacatacaccatttaaagaaccattgaagatgtcaaatctttgtatggaaattgtgttgccagtgtatggttttgagaaagagacagacctttacagagacgatgctgtgaaagaggatggtgaggtggctctttgcttcctagctagtttggttgcagggagaatttcagaagatgaatacgctgacgttgcttattatgctcttgcaatggttgactccgttattgaccttatggattatccgtatccatcgatgcgcaaccatgttcagaagcgtcgttctgttgggattggccttacaaatgtggctcattaccttgcgaagaactacgtgaactactcttcacgagcaggtaaaacgaaacttcatgaactggcagagatgcactcttactatctgcatgaagcctctctgagacttgctaaagagcgtggcgttccagagtacatgaagttcactaagtatcctgaaggctgggttcctccaaagacagctaacaagaagattgatgaaaagcatgatgcaaaactacgatatgattgggatgacttagcacaacgtatcaaagaaaatggtggaatccgaaactctgtattagaagcttacatgcctaatgagagttcttcactggcaactaatacgacaaatggcttgtacccaattcgtgactttattttaactaaaaagtctgcaactggtaacgtgctgtttattgttccagattatgaagagttgaagtatgtatatgaaattgcttggggtattgacacctttgacctgattgattgttatgcaattgttcaaaagttcactggtcaagctatctcttcagatttctatgttgactacgcaaaagctaagaaggtatcattggctcaagctttgaagtacatgatttatgccaactcggtaggtatgaaaaccatgtactaccttaacagtcgcattggtgtaggtaaatctgcactgcaagatgcttattgcgagggttgtggtgtttagttttaataactatgagggtcgtagaagaccctctaaaaataactttggagagaccatgaaagatttaatagaaaaacatgagcgaccaatatacttgctctacaaaccccgcaaaacattgtactatgtgagcagcacaggtatcatgataaagcagaatgatgacttatgggtcactggagcctcttacatctctacagcagatggtaaaatctacgcaagaccttatgagatgtttaacaaagagaattgggaagttttagacagaaaacaagccttagaaatgataaagaaaggagaaatcacgctatgattaaccagcacccaatctttttaggtggtgagagaaaaacttttgactcactcaataagcactacccaaaaatctttgaactttataaacaacaaaaagcacaagactggtcagaagatgagttcccttttgaacaatcacgtcttgattttgagagtgtcccagcatcaatgtcaggtgtaatgcttgagattcttaagtggcagtgggaagcagacactcaagttgctaagagcttggcatttgcctttgcaccctttatctctgatgacatctatgcaactgcaattatgaagcagtctgagattgaaaacctacatgctcttacttactcagagattgtaagacaatgtattaaaaaccctgaaacaatcttagatgagattaaccagaatgttgctgtacaagaccgattaaaaactgtgaatcgtgttcttgaagaattactggatgaaggtataaactatcgtctgagttatgtgcgtgactcacttctggacaaagaccctttacacttccataaagtgattctaaaagggttgtttgcagtgactgcgcttgaaggtatatcttttatggcatcctttgcatgtacttttgcacttgatgctcaagataaatttcagggtattgctcaagctgtccagaaaattatgcttgacgaaatccttcacactaaaattgatattgaagttttaaaagaaactttaagagatgatgagtggcagaaagcttttcaacaaattcttccagagattaaagtaatcttagatgaagtagttgaaagtgaagagaaatggtcgtattatatcttctccgaaggacgtgctgtagttggcttaaatacaaagcttcttcatgagtgggtttactataatgctgccccactgtatgatatgtttggcattcccagagattttgtagctcctaaagaaccacctttgaagtatatgattaagaagatggaaattgataaagagcagaatgctaatcaggagcaacagaacggtgcgtacctattgaatactgttgtagatgatttgaatagtggatttttagaggttccttaatgacttatgtaatttactccaaaactggatgccctcagtgtgagactgcaaagaattttgcaaaagctcgtggtattgaccatgttgtgagaatgttagggcaggactatgaactatcagacctgatggagattgcacagatgccagttcgtcagatgccattcatcatgaaaactgatggacaaaacctaaaacctgttgggacgctacagaattttatggcagaggtgaataatgcttaaacgcatttgggaaggtttggttgttgatgcaccagcgattgtgattggtatgttgattgttaacctatttactgactttgaacaaggttcattgtttggagccatgttactatgggttatcttcgaaatattagagatacaattaggtatcactgaaaaactaagagaactctttgcgaagttttctaaaaagatttaaaatgaaagggtctcttcggagacctttttagcatgtaaaggggcaataatgaacaaagtacagattattaaaaagaatggctcactcgaagaacctgatatcaaaaaagttttagcagcagtcacaaagtcagctaacagggttggatataaagaactgccaccagatgttacccaagctcttgagtcagcatttatgaggattctggtaaagtccactaaacagaataatttactaatttcggtaaatgatattcacagtattgttgagggtgctttggcagaagtcaatcacgaaatctatgagtcttactcaacatatagaaattaccgtaaagaagttgctcaaaattgggatgagctttaccagaagaccaaagatacactcttcttaggtgacagagagaatgctaactttgacagtagtttaatctctacaaaaggttcaattattcgtggttatctgactaaagaaatctttaaacagtaccatttaacaccggaggaacttgaagccattgaaaaagggtttatctatatccatgatttaagagacctaatttttggtggtatcaactgttgcctgttcgacattggtaaagtcctgaaaggtggttttgaaatgtctggcatcgaatattgtgaaccaaagtctgtactgtcagccttacaggttattggtgatgtagttctttcagcaactgcacagcaatttggtggctttactttagcagagattgataaggtacttgtaccgtatgctaagaagtctctacgttaccatgctgaaaaagcagcatcttacggtattcctaaagaacattaccacaattatgtcatggagcagctacagattgaattaactcaaggttttcagtctcttgaaatgaagctcaatactgtaccttgtagccgtggggattttgcattcacaactttgacattcgggttacttgactcagatatgtctaatgaagataaccgactgcaatacatgattgcaagtactatcctagatgttcgtatgaatggacaaggtaagagcaagaagcctgttgtattccctaaactggtttatatttatgaccagaaaagacataatgagaatatctgtcaaggccacctgtacagtaaagctattgagtgttgctctaaagcgatgtatccagatttcttaagtgtatctggtcatggtgctgtagcagaagcttttgagcgttctggcaaggtaatttcgccgatgggttgtagagccttcttatctccatatcttaatgaggatggggaagagttctacgttggtcgtgctaacattggtgctgtatctttgaacttaccaatgatttaccagtattctaaagagaatggtttagatttctggaaagagcttgataagtacctagaaatgattcgcagcttccacaagaaacgttacgaaatgattgctaatatgccagcaagttctaaccctcttgcatttacacaaggtggtttgtataaaggaactaagaagcctactgacagggttggttgggatattgtgaagtccttcacagcttcttttggggttactgcgcttgatgaactatctgttcttgctgaaggtaaacgacttcatgaagttggaagctgtagttttgcatacgatgttctggaatacatcaacatgaaaactgaagagtttaaaaatgaagatggtttcttatatgcagtctatggcactccagcagaatcactttgtggaactcagctaaaacagttcagagagatgtttggcgttagcaaaggtgtttctgataaggaatactttacaaatagtttccatatgaatgttgcagcagacatcacaccatttgagaagcaggacttagaagaacctttcttccatatctgtagaggtggaagaatccagtatgtaagggtagctaatccagagaacttatcagcacttaagagttgtattacaagagggatgttgaaaggtttctatcagggacttaactttgacttagcaatctgtgaacattgtggtaacagaccaaaggctgatgttgaagaatgtgaggtttgccattcacatgatatctctgtgattaacagggtgtgcgggtatcttggatggactaagattaaaggtgaatcccgaatgaacgatgcaaaaatcgctgagattcgtgacaggatttctatgtaaaacttgacatggtgctggctaagcgctcagaccgctcaactgacgggcgcatgaagcgtaagacagctgagtggttttataagctgcacaataaaatcagcaatccaaaaatcgaagaaaatgttggcgactttcggttaatgagccgtgcggttgtcgagaacatcaaacaaatgccagaacgcaacttgtttatgaagggtgtgctcagttgggttggcggaaaaacggatgttgttaaatatgcccgtgccgaacgcgtggccggtgattcgaaattcaacggctggaaattatggaacctggcgctggagggaataacttctttctcaacatttccgctccgcatatggacttacattggattgtttattgcaggtatgtcattcctttacggtgcatggatgattattgataaattaatatttggaaataatgttcctggctacccgtctcttcttgtttctgttcttttcctgggtggcgttcaattgataggaataggtattcttggagaatatattggtagaatttacatagaaaccaaacagcggcctaaatacatattaaagcgtaagggttttaaaagtgaaatttaaaaggtgatgtgggtcttgataggcttacatcacctttttttttttattggatgttagatatggcagatagtattattgggttattcataggttctgtcttactagggttctttttaggactttcttattgtgaattgagagataagttaaaatgtttaagatatcaaaaacgatgatatacatactccacattctagtcttcttctttggggttagtgttatggtatggggtttttcagacccacaatggagtttctcatatcatggtcagatggatttatggtcatgcttcaaaccatttttagggttagctatagcattcagtgcattaccaactaaggtgaaattatgattaagttgagccaaaaacagttagagtggattaaggattacgcctcagagtgtggctcttgtgaaaagaatcacgtaaggtactcaacattccacacggtcttcacattgtatgttggcgacaacgttctaagtgattccgtagtggatggtgtaccgttacctaatgagttacttgacaaattagctgtagttactggaacgtggagtgaagaagatggtcacgacctatctaacgatgttgtcttctacagtcttgaaaatattatgaatccagagtacattatgctaatgacttgtgcacaagactgtgttccattacaaaacttcattaaagagcactgtgaagagtttattactaaacaggttccttgtcaggtagtgtttgaatgagtaaaacaattaaatagtattggtgaggtaactagatgaattacatggagattcgaccatttgacacagctaatggtgaaggggttcgggtaagcctcttcgtagctggctgtaaacatcactgtgaaggctgctttaacagggagtcttggaagtttaatgctggtaaagagtttacttatgcaaacctctacggcatcattaagttaatggatgataaggccattagtggactgtcaatacttggtggggagcctctggatgatagaaacattcaagaggtcaccaacatatgcaagcgtattaaaactgtttatccagaaaagtctatatggctttggacaggttttcaactgcacgaaaaaatccacttagatgtgatgaaatatgttgacgtggtgattgatggtaagtatgattcatctaaaccaacagttaaaccatatcgtggttctgataaccaaaacctctggagaaaagagtatgggtggcaaggtgattgtcagtggagagccgagtaagtctcgtcgtaaagtaggttatcggtaaaggccactttacaatgtgctacagaacaaacttaaccgttggtgtcactgaagaagaacttaaagcattttgtgaaaagattgagagagatacgaaatgggaatctggaacagttttaaatcaaaagtaaaagcagcactggcatcactaggtatgctcactggtgttgatgtgactcatctcatgcagcacttcaagatggatgagaaactagctaatgagattatgaaaagtatctatgtaggccgtggtaaaggtggtaagaaacaagcacatcgaccaactggtgcagcagctattaaacgggcagctaagaaagctcgtaaccgtaaacgtaataagaaggctaaataatcatgagcaaagtttataacactcgtaaattacagattttcgtactgtgccagtttatggctaaagagtataactgctactactgtggcacagggttcatcagtgacaatgacggctcatatctaccgttcaaagaggctgtaaaactcttcaatgaagaagtaagctctaagaaagatatcgaaaaggttaagctaacctacagtaagaaagataagaagattatctgcctagataactttgtaaaagttactggagaagcaaaagagtttatggatgagagtgagatttcattcacaagcatcttgaaagtagctcagtaaacagatactataagggaactgcaaaggttccctttttatttttggagataacatgtatctgtcaaatctgaaacgttcggctgcaatgtcagttctaagactcagctttgaggaacgtcaagagttcattgactcccaccaatacgacccttctaactctaaccgcatgattctctggaatcgtgatagtactcgtgaaagggcactattccgctattacccacattacaccatagataacctgtatgaatgttttgttgtgaagaacactatcacaattctcaacaaactttgcagatacacaggtaatcaatccttcacattaggtcaccacaagcctgttacaaaaggtggtgaacatcactgtgcaaactggtttatccagactaaacttgataaccagaagcaaggcgatagtcttttaagcacccctaagatgacctatgaagagcaagagaaatatatcaaaaataatatgccagatgtgcttgacaacagctatacagatttggcaatatctctcctgttgaagttcgagacagtttatagggcaacttacgatggctagaacagattgggaagtaaaagaacttgtaagtgatgctggaaatggctgtgaggtgtatatgattcgtggccatgtgccagacccattagctattgagatgattgaccatcacacaagtggattctacaaagaactcggtgaaccaagtgttgaaagaacttggacaaaaccagtaccagatagcacaggtaactgttcagtaatctatcacattgtgaatccacaaaaatgcaaaacagctatggctgtgacattcgtaacttttgattgagagagaaaattatgaaaactattattgaagccgttgtcaccgcacaagagaaattcttccacacagaaaaatttaatatcatccaatttccatctggagaaattggtggaaacttctctgaagactttgttaagtttactgagcgtaatgctggtaagattgacaatgttatattgactgtgcagggatatgataaagatacactgtttgcattagctttggctaaggatgccgttgacagtcttgttccatacaaatcagcgatgaaaaccgttgttttcgggttcttaccaaatgctcgatatgaccgccatatgttcaaaggtgattcagcagcactgaaagcttttgccaacctcgttaatgcaatgggctttgatgcagtgtgtgctcttgaccctcacagtaatgttgcagaaaatttatttaagtgctttcagagcatgaagcaaaaagatgtagcagcacactttgcaagtgacccacgcattgatttcttggtagccccagatgcaggtgcagctaagaagactgaagagactgctaaagaggtagataagccatatattacaatgtctaaagtacgcaaccttaagactggtgaaattactggtatgcgaatccttgatactgttgatttgaccgataaaactgtcatgattcttgatgatatttgtgatggaggccgaaccttcatagaagcagctaaacatcttcgtgaagcaggtgcaaaacgtgtggaactctatgtaactcatggcattttctctaaaggtgttgaaaacttacttgacaatggtgttgaccatatctacactacaaactctttaggggaagctaaagaccgtggcttaacacattatacccaagttactgtagtaaccattgattgaaactttataggggcttcaaagccccattttgagagagattaaaagatgactaaatcactttatgcagtaccagcaggtttaaacgcagatgcttacaaatctggtcacatttaccagtaccctagtgcaacagaatacttgatgttcaatctgacaccacgtagtgataagtggttcaacagccccttagcaattgatggtgtagtcgcttttggtattcaacgttttgttaaagattacctgatagaccactggaacgccaccttcttcgaacgtgacaaaaaagaagcaattgacgaaatcttagaagttatgaacggtgttctgggtaaagatgctattggtcgagaacattgggaagcactccacgacttaggttatctaccagttgaagtctacgctgtagaagaaggcacagttgttcctatgcgtgtaccaatgattgtcttccagaacactgtttcaggtttccattgggtagcgggatatctggaagatgctttctctgctgagatttggaaggcttgtaccattgcaactattgcattgcactacaaacgtatctgtaagaagtggtctgaccttacttgtgacaacgacttacatttgccttatcagtgccatgactttgctatgcgtggtatgtccggctttactgatgacgcatttaacgctgtaggtcacttaacaagctttaaagggactgatagcttccctgcggtatatacagctaaacgcatctatggacagtcctatccaatctctgatattggtagctctgtaccagccactgaacactctgtaatgtgtgcaaacattgcttgggaaggtggtaatgagttgattgaagaagaaagacgcttcaaaggtgagttacaaaccttccgtcgcttcttaacagaaacttacccaactggtattgcaagtgttgtttcagacacttataatttctggagaactgtatcagtaatactaccagaactccgtaaagagattatggaacgtgatggcaaactggtaattcgtcctgactctggagaccctgtacatattgtcacaggatataaagcaattcacttagagtgtgctaaaaaggcttattacgaacacctaagcaagcagaatgccagtgacacaatgttgagcaccgtcctgaacatgaagcttgaagatattaactatgttatggctgggtggttacgtgcagaaggctatgaaatggtggttgacagagaagactttgaagtagccgatacagtgttgctgaaagatgcttacatcaacggctctgcaaacgttgtaacacgtcctgtagcggagattgatggagctattaagacactgtacaacatctttgggggaactattaactctaaagggtttaaggtactggatgagcacatcggccttatctatggtgactctatcacgctggaacgtgcaaacgaaatcctgaagcgtctgtatgaaatgggttttgcaagctctaacgtagtgtttggtgtaggctcttacacttaccagtacatgactcgtgatacctttgcatttgctgtcaaagcaactcttgcaagcattggtggtaaagagattatgcttgcaaaagaccctaaaacagatagtggtgttaagaaatctgcttttggtggtgtagcacccatgtgggatggcgaaaagctgaaagctgtagatggctatgggttccagagctttgcagatgtacttgaccacccagcttgtgctttacgtctagtctttagtgactctgagcagttcggctacacaactcttggtgatattcgaagtaatattgacaagcagctttaaaagtatatgataagaggctcctacgggagcctttttaatttctggagaatattatgaaaatcaaagagatgaacatcaacattgtcttagaagaacgttgggagaacatcaagaagcctgaagatggtcataagttccttaacaaaatcttagtagcagctaaagaggaactgactggtaagattgcagcagcaatcacaataaaggtttgtgtaaaaggtcttccagacaaccaccaatttgcacttgacgagtttaaagaaagcttctacaatccaaacaaacagatgcttgaaagtaactttgcagtgtctacaagtatcgtccatgacagaagctttatcctttacaagaatatgagaggtgagtcatgcaagcatattggatagaaattttactgtcacttggcagtgtagcagtctttgtttaccttctttgcaagtactatgcagagcacaagaagtgtgattactgcaatggggaagggtatacaagagcaggttgttgccctatgtgtggcggttctggtaaaatgtttaataagtaattcaacagtaaactaagaggaaagtattatgcgcatggtaaacgaccacgcagaagtgattaagagttcaacttctttggagacatctcaagcacagattacaatgacacctgaaatgttcagccttctgagttctggtgtatacacatttaaagaaagggcagtgattcgtgaactgtcatgtaacgcagtagatgctcagaaagaagctggaagagagaacatcccgttccatgtgcatttacctactcgttttgagccttactttgaagttcgtgattttggaactggattgactcatgataaagttatgagtttgtacctaaactacggggcttctacgaagaatgactctaatgattacattggtgcaatgggtatcggctcaaaatctccatttgcaattgctcagtcattcacagtatctagctatgttgacggtgttgttaataagtactctgtttatcttgagaatggtatccctcaagtaactaagctgacaactaacccaacaaaagaacctaatggtttagctgtacgtgtggcagttgctgaccaccgtatctcaaagttctttgaagaagctggtaatgtatactcatactttgctgtaaaaccagaaagtaatattgtgtacgacgatgtattagcagatatgaacgtcattgcccgtgaagagggtgtttatgatgccatgattcataagcaaagttggcgttctagtggtaacaggacagagtttaatgtggtgatgggtaacattgcctaccctgttaacatggaagcattacttggtgatgacttcttcaaagtattgccagaatttttccgtaggagcgtagaccttgtaaacatctacatgcctattggttcagttgctattgcagcttctcgtgaagcattgcagatgaatgacacgacaaaaaatgttatcattgaggctactaaaaagataactgaagccattacaaaggatgttatcaagaaagttaatagccaacctacactcatggatgctgcacaggcttatgctgagttacgtttgaactcacgagagatgtttaatgctgtgtgtccaaagctagagtggggaggcgttaagcttgattctctggaagaagaattgctaaacattcgtcgtgggattatctacgcagaagacggctcagtcatttatgaacgtgatggtaaaggtaatattaaggttgacagtaaaggaaacaacattcctaaagtggactacctatacaatccagttgcttatgtcaagttcaactctttagagagtaagattcgtgcaacagcactttcctacactcaagaggcaagtatgttcaatatctttggtgcaatgcgtaaaagccaaattgaacagtttttgttcgtgattaatgaccgtcgcaataaaaacggtactgagaagactgtaggacgcaatcaaattttgcgtggtgcatgtcgagactacgccagtgagtcaaatctgtttcacagatacaatggtattgtctttgtattctcgactgaaaaagagttagatgatttaatcaatctacacaaacttgataaaagcttgttaaagattgtgaagatgtctgataaggaacaccactatcagcgtaaagaagctgtaaggggtgttgtaaaactctggaaagctgttccagcagaaactaaagcttcatacaaagaggtgtcagaagacttagacacaattgaagagcctcagctttatattaaggcagtaggtgacacagttgatggtagatgtttttgctcatctccagaggatgtagctaagtcagttgctaatgttacaggcaagacagtctatgttttccgaaaagcaaattggaaaaagataccagaagactggattgaagtagatgagaagctcttgaacgacagcttaactgatgttcattggattaaccataacaggtatatgacacgcatctacatggatggtgtcctcgaccttacaagcagttggattattgccagaaactttacgttcaataacaggaagatttctcgcgggtattgttattcaagggatactattaagacaatcttcttagaagggaatgaagatgctgttgaggcaatgttcggtaagattcagtatgtggctgcaccgtttgcatacacttacactatcagtgttcttcaggatttgaagtcatgccttgataatgacacaaaactgtacaaaaagattaaaaaagcaggtgaccgcatggttatcaagctgacaaactatctttcaaaaagaaaacaagaaaacttcttgctttcacacttagattggaataaagtatcacctatcgaagtgagtaagtttttaggctttaatgtgaaatgtgttccagaaggtacaacaatttacgattaaagtgtttgacaaggggctttgaagccccttagaatagcctcacaaattgattgattaactaacaagagagagtaataagatgactactaaaactaaagcacagattgacgcagaaatttacaaactggttaaagaaggtaagctgactaaaacagctattgcacagaagttcaatacttcaacccgttcagttggtcgtgctgtagagcgtcatgaagcaaccttaaaaggcaagaagaaggcaacttctacaccagctacgaagactttgaaacaagttgctaagacttttaaaaagaaagctggcaaaccagttgaaaaggtcgttaaagacactgtacagaaagctccagtaaataaactgcacgaagctatgcagaaagatgacaagattgagtacatgattactggtgattctgtaattatgacttatggttcagaatctgaaattgttgagtctactcatccgaactatcaagagattgtagttcatgttgtgaaaggtgagttcaagaaagcatttgaactgatgaacattcgtaagtctatcgaaaacttcactcagggtgctatcacaatcaaaggcgacaagctattctacggtgctgttgagatgcgttctactctggttgaccgtattcttcacatgatgaaaactggcgataaaggttttgaacgacttgtaatgttcttcgaaaaactgatggaaaacccatctaaagattctgtagaacaactttggggatttgtatctcaccttgatgttgaaattgatgaagaaggctacatcattggttggaagaaagtctctactcgtgaaggcaagctggttgactctcacacctacaaagtgcctaatgatttgggtaacattgtagaaatgccacgttggatggttgataataaccgtaacgtaacttgctctcaaggtcttcatgttggtgcttgggattatgttcgttgcttctcaggtgatacaatcctgaaggttcgcgtacatccacgagatgttgtatctgttccaactgattacaatgatatgaagatgcgttcctctcgttatgaagttgcagcaatcgttgataatcaacgtaaagtgctggaagcatgggacggtaagactgaagctttgcatgtcatcgttggcactgctggtgaactcatctctcaacgtaaacgtgaaatctaataagtaatttcttaaaaggctgcttcggcggccttttttatttgtattttgtgcagagtgctgtataattgatgtcacgataaactaaacaggagaaccaatgaagaaattgattctaggtttgtgcttaatgtttacagcacacttatcttatgcagttgactgcccagagctatcaattagtcaaaaagtaaacatgttaaaagcttaccagtatggtgagaataatatggggaaaggctggggtattactctagcagctatagccttacaagagtcagagttaggtctgaaggtagagaataaaaagacccacgactatggtattttccagaatcacttgaagactgttgtaaagcgtaacaaaattagtcctaatgtggctaaaaagaaactcttaaaagactttgactatgcagcaagagagacacataaagagcttgagttttggactaaggtacatggtcacccaaagtcaaagaagactttacaaaaagttttagcatcatataatgctgggtattcgtacaaaatccctaaagctaagaaatactctcaagatgtctataacaatatgaaagttatcgctcaatgtgaatttgcaacaaacatttctaaggtaaatcatgaaaaaattaagaaagtctgatgaagtcctgtgccatgcttacgacttgcaccctcatgagttaggtcttgattcctgtgtatggactccagaacagtgcagggattttgaagatactgcaagagaagttgtatgttcacttgaagagttccacacatcagaaccaattgtgagcgttgtggacaaagagactggacaaactgtaggtgtaaggcgtgacagcttagtcatagtcaataaagaccttgtagaaaaaggtaaccttatcttagcagatattgatggtgttcttacaaattttaatcacgaagattgctcaacggaattgactgatgggtcattctcacagtacactaatcttcttgactctgtaagagcaaaaccaacatatgtttttagtattattgatgcaattgctaatcatgctgccattggactcttgacagcgagaggtgaatctcagagaatacctactgagatgtttttaaggcataacatagagcatgattacatgctttttatgcgtggttttggaactaactctataagtgcagaaagtttaaaagtgaggatgattcagtcttgcattcttccttattttaatatagtatgctttatagaagatacagagaagaatgttcagaaggtaaacagaatccttccacacattaaaaccatgttagttaaacattgagagaaaaacttatgaacaatatcattacggtagcactggacgatacggcaaacaaatctgaagtagttcgtaaaatgattcaaggtaactttgaaggtaaaattttccgtgctgttaatgtaaaagctgatggcagtattcgtgaataccgtgcattgttgaatgttaaaaagcacgtaaaaggtgctggttcaacgactgcacacaaagaaaacctgatgactatctatgatatgggtaaggcttcagagttaggtgctgaaggtatcgttaaagaaggtgctccgtatcgctctttcaatctggaaactactcttatgctttcctttacgagtggttctaaaacaatcacttatctctttactgatgctgcaacggtatctgctattaaggatagcactgtcaaagctggcgtagttgctgctgcaaaagcttcttcgatggctgcgaatatccttgctaaagtcctcggttaaggttaagatacaggctccttcgggagcctttttcatttcaggagattgttaaatgacatttaaagagttctgtcaagctactttcataattgttttcttagttggtgcaggtgtctggggaggatactcttacagagactatcaagttgctgaaactgagctaaataatgagaaactaataagtgttgctaaagatgcttatcaggaaggtttagccacactcagcaccaattacaaaaatgatttgaaagatgtgcttgctaagaataagcatacaaaagaggtactaacatatgaaaaaactaagccagagttttataatgtttgtgctactgataactatgtcagggtgttcaacgaacaaagtgaacagtacattcaaaaactcccaagtaagtgagagtgataagtacactcaagaagaatcacggtatatcatcaaaggcaacacaggcagtgatgtagcagcagcccttgagttctatcgtgacggcttttaccagtgcacaatcaaagctaacaaccttattgacatgattttattagggaataagcagcaatgacagagaatcaagatactttctatgtagaaggttacttactgttgccacgaccaaaagaaacttatatgcgaattgatttcttaccaaccattatggataatgtgatgtgccatatctttatgcaaggtgtcacagcacagcttaagcatgttggtaaagagtgcaaaataaaggttgacactcatccagaaatcaaagagaatcactacacatggttcttaccagactctaaagaaatcttagcagttcttaaaacgaggaagtaactatgcagattaatggaagagactttgtagccgtttactacgagaaaggtaaagaagttggcgtagcacaagtgtcttatggcaatggtaagtggctatatggaacaatcgcagtagttggaacaagaagtgatacaaaaacttttaaagattgtgttgaccttcttgaagaatccattcagaatcattggtgtctgatatggatgactgacaatgaagtgatagaacgcttcaaaaagattgatatcaacattgatagtattgagcatgttgatttatatgagctaactgagaaggtaaactatgagagtaattctagccagagataaaaagacacggaaactcatccggtcagcagtattcattggaagaaatgaagtcatcccgtttacagcaaacgatgtgatagcctacaggaaaaacttagtatttagtgattgcttgcgtggcttcatctcccaaccgttggaagactttaaaagccgttgtggtaaaggtatcatcattcaagaggcaattatcaatggctgacttctgcaaagactgttctatagaaatgtttggacgtgatacaggtgacttaaaaggtcttatcactgaagatgactttaaagctggctacgcaatgccagtaatctgtgaaggttgtgggtgcatctgggtagaccacgaaggacagcgtgtaaaaccttcagaagataaagaatcttgggagagatgttaaatgggtattgtaaaaatcatcaaaggtgatatctttgatgcctttgataaaggcaaatttgatatcattggtcatggttgcaactgtatgaatttcatgggtgcaggtattgcagcaactatttctaagcgttatccaaaagtgtatgatactgacacagaagtttacctgtttgcaggtggcattcgtcacaaaccctgtgaaaatttactaggtaatttctctgtagcacgtttaaaacaaggccgtatagctaacctttacacccaacttcatactggtaaagatgcccgatacagtgctttagagtcatctttgaaacagcttaacagatactgtgaagttaaccagttgaagaaagttggtctacctatgattggtgcaggtatcggtgggcttgaccctcaagctgtcacagttatcattaatcaggtgatgaagagtgtagatgtttatctgtatgtctatgaagcaaaaatgtataatgagttacactcaggttggaaaaactactgtgaaccagaatactttgcaggtgtagttgtgttcacagataacgaagttaccctcttcagacgaagaaaaggtaagatacatcaaagtaaccctccggttgaaaagatgtctctgagtaacgctctagttacccacctgtcgaagagcaatcacaggattgcagtaacatttggcagtgatgcagatacttatatctatgcaagaactgatgaggatatcgagacagttttctcttcgccagaagttaccttcttagacgcaaagaactaagaaacttcgtaggatattcacaatagactaagcctttcttatctggtaaatttttcaggtaaggagggctttttcatttcagaattgtgcaggtatatttctatagagaaatctgtagaggaaattttgaactccaaagagaaaattcattttcaaactgtgcaggtaatctccaaagggttttttcattttcaaaacgtgcagagaaaaatcaggtcgggcaagaaaaatcattttagatttgtgcaggtaggtttttatagagagccagaccaacccctctccccctcttactccccctctccccaaaagtcaagagaaaaatttgtagcggattgaaaaataattcttgatttgtgttctgttttgtggtagtcgtgtgcgcccgtttcattacagttttgccaaaaatatttttaaaattttttcttgactctttgaacgtggttatctagtatttgcatcaacggggagggaatgaccttccccactaaataaagtcctaaactggagattcaaaaatggcatatcgtgcacctaaattcatcaacaaagacaactttcgcaacgcactggagaagtcacttgatgaaaattttaaaggcaacattatcgttgttcacgcattcaattttaagtatgatgtaaacgggaatagaatcaaccatta

SEQ ID NO: 197 - DNA, 89542 bp, Artificial Sequence
  Synthetic polynucleotide
acaaatagtgaagagataaaccaggttgagcaagaaaaatctttttattgtagtgcatatagatttattaagagggctagaacacatacgaagatagccttatcatcaatttatctaagaattataccaaaatttttagcaaaaagcaagaaaaataaaagcctgatctgctgagatcaggcttggttgattaatcctctggattaacatccaggaaatttttaatagcatcgtgcatagtttctttacgaagctgacgtccaatcaaaatatgaataggttcgactcgaccattaggtacttgatttgtgttctgttttgtggtagtcgtgtgcgcccgtttcattacagttttgccaaaaatatttttaaaattttttcttgactctttgaacgtggttatctagtatttgcatcaacggggagggaatgaccttccccactaaataaagtcctaaactggagattcaaaaatggcatatcgtgcacctaaattcatcaacaaagacaactttcgcaacgcactggagaagtcacttgatgaaaattttaaaggcaacattatcgttgttcacgcattcaattttaagtatgatgtaaacgggaatagaatcaaccattacacggcaaccatgttagatggtacgctatcaagtgaaaaagctgtactgaatgcacttgctggacgtggtaaaaacctgataaaatgtgataagagacgttatcagggtggcgcatatggttatgatgatgctgtttatcatcttgaaaatatgggctatcaagtagaaaaagctggagcgcctcaaataatcggtagtgatggttacgtaactatcttcaaaattaacaaataaagtactttacaaggggcttatagttcgataaagtaagccccagatagagagatttatcaaataaagcccttaaactaggagattctaaaatgaaattatcaaatcaagtgcgtgaaaatctgagcaaattactcaacaaaattgatttcattgaaacatcaaggaatagccatgatgttatggaatggttacacggcaaaataaaaggtcgtcgtgtagtgatttgcttatggaacagttgcagggagtataaaaaacctgtattgcaagtcaatatctatgatgacacttttaaaagtccagtaaagtctaaaagcgatttattagaatcctatgagataactgtaagtggcaaagtatcacgtaaagaggaaacaccatgttaatgactggtatcactgcaatcattgccattttcgcgctatataaggcatataaagcctataatctagcaaataaggcaatcacacagcaggttagcaataaccttgtagagagctttctagggcgtctcagtgatgagcaaataaagcggctagatatgagcttcagatataaagcgaaaacctatcagataagtgacatcttcaaagatgattttcagttagtcgatgattataattctctgataaatgctttaaatgtcagtgacttaaaagactactacgctgtaattgttcaagagttgagcaaacgaaaacaaaactgttgacactggtttttagatagattaaattacacatcaacggggagggaatgaccttccccactaaataaagtcctaaactggagattcaaaaaatgttttgtgcaggtgataaagttgtctggaatgatatagatgacggtttatgtacgaaagttgttgttatcttagaaattgattatatcactggtgttgcaactgtagcagataatgatataatctttgatgtcttaattagtgaactgtcaaaataaaatccttaaactaggagcttttaaaatgtatactactaacaacggtcgtactttaaatgtcacactacgtcactatgtgaacggtgtaatgcacttcgaggatttacaagctgaacagcacattttggattggcaagttgcaggactccaaaaaactgctacaggatacgggaaaaagattccaaccagttggaaagtatactacgaaggacgtttgcgcagaatttatcaagatgtgcaaagcaatagcgcatcgagttacattatagtaaaaggcaaaaaactgcatttaatgtaaagtactttacaaggggcttatagttcgataaagtaagccccagataaagagctttactactcaatcctaaattggagaacttaaaaatggctattaataaccgtgaattatcaattttaaaagcacgtttgaccgtcaacaggattaatgttctgacatcatcagcgcctgatgaaacattgcacaacattatcgggaagattcaaagtgttatcttagacgttgaaaatgtaaaaagttcattggctgacgttgcatcaggtatcacgctagacggcgcgcaatatgaaatgtcagacatgttaggcaaatctaaggtaatgaataaagagttagatttgaaaatgttccgatttgctgttaaagtgtggttatctgtcgagtatgatgctaactttgcaatcgctgactttttcgccacttggttgcagcgtaatttgtcaaatcacgattttcgtaatatctgcgatgcaatttatgcagaactctaaaaaattgttgacacttatttttagatagattaaattacacatcaacggggaggtattaaccttccccactaaataaagtccttaaactaggagattcaaaatgatgaattttttaaatatccctgatacttgccgactgttgacgcaaccagaaaatttaggcaaacctttcctgtaccatatgccagacaatacaccaaaaacatatagctacacagttaaccgctttacgggttacgctgcaaaaaacggttacaaggttactactcaaaaagtaacgctatttacaaatatcgaagagcttccaacaatcgctgtaaaactaatatttacgaagaagacgcaataaagtactttacaaggggcttaaaagttgatatcttaagccccagataaagaactttaccactaaatcctaaactggagattctaaaatggctattattaacggcgtatctatcgagactgtacacatcaaagacattaaagccggtgatacagttctttttcacggcgtagaaaaaactgtcactgcaaaggatattaaaggggattctttcatgggtaggactctcttcggtgattcttattgcttaggttatcttgcagttttaaaagttgtcaaaaataacaaataaagtactttacaaggggcttaaaagttgatatcttaagccccagataaagaactttactactcaatcctaaactggagattcaaaaatgaaatgttttcacggtactactcaagaaaatttcctcaacctgattaataacggtgataaaccatcaggcgcatggaattgttcggatatggacggcaatttttacgtgtatccagaaaataaaatctatggcgacgatgaggaagaaatagcatcagagggcattcagcaagctctaggtaatgccactatcaccgcagcttttcagatgaagactcaaaatattgttatcttagaactcgatattccagaggatgagctaaacgatgattattcttgtgataatatgtcgagtgtagcaagttttacagagtactttgatgtaaattggattaaaaaggtctatacaacagagtttaacgctatgtattcacctttttgtcttccttcattggataacccaaatttaaactatcttgatgagtctctggagcttcttgctaaaagtgttcaacagtcggacagtattcaggttttttgtgacatcatggatacactgacaggaaacattgcagaagaggatttaaagagctttttctaaaaacctatgcaatcaccttataaacactaatcagccccttgtaggggcttttagggggcttaaatcatgcttacaaccgtttaccttatcctttctatttgtaatggccattcatgtgattttaaagggcttgaggagttcacaggaagtaaagaaaatgctattcaagtttgccagatagcaaggcaagactatcccgcaagtgatgatattcagtgttactttaagacagaagatgacgacggaatctatttcgatagtgttgatggtcagtatgagattatcattgaaaaagactagacaagcctgataaaagtctgtaaattgtcaatcaacggggaggaaatgacctcccccactaaataaagtccttaaactaggagattcaaaaatggcttatgtaaccgtaattaccgataaagctggcgcatcttggtcaactcaagtaagtgataagatgtcacctatgcagtgcctaaaatactttgaacagtggaataaaggcgaggacacaagcccctttcaagtgatgcagattatccatgtagacaacgaagggaataaaacgacactgaatagtgagtactatgcaagccgttttgaaacgagaagtaaaacaatgaagcttttacgtgaatccggttatgcccatatcgccgcgttaatctgggatgacctgctaaaaagtcagcgtatcagctatgtaaaacctgaaaaaatattcatcagttaatcaataacttacaaaaaacttttaaaaaagtgttgacaataccccttgacattggtaactttgttcgagggggtttatctaaaagggattcacttaaaagactctttatagataagctcaaaaaattacttgcaatcagctatcaaaacaagtaaattactaatcaacgggagggatgacctcaccactaaataaaatccttaaactaggagagtcaaaatgaacaagtttaaagctatcaacttcatccgttcaaatgctgtaatgtctaagcctgtaaaagatacatacgaatttcgttgtaatggggtacactttgcaaccatcactaagtcagaaaacggggcttattatgtacatcgtcgtaatgttgcaaccgttgtagtctctcactttatgcaagctgtagcggaattattaccgttattcttagagatttacttagatgagtgtaaaaacgttcacaaccacgttaaaaaccttttaaacggttataaaatggcttatgaacgttctatcaagtccttaaacaagttctataaagcccctgaaaatactgtatcaatagcttatgatgtaagcggtgaaatggtcaacctctccaatgtagaacaaattggcctttatgacttacgtcctaacggttacgctaaaactctcggtgaaggtttaaccttcaatatcaagaacttagaaaaaactttaaaagatattgaaaaagatattgacgagacaatcaaaagtctgtaaattatcaatcaacggggagggaatgaccttccccactaaataaagtcctaaactggagttatcaagatggaaaacgtagaattaaccacactattgcagattgcaaccgacaaagaagatgtagcattatttcaccgtatcgaaagcgatttgttcaatggtgaaatcatcaaagaatcttatgaagttgtcggattcaaagatggtaaagcgtttggattctttgacctcgacaaaggcaacgctgttacaaagtatgatgttttgtcttgtgagattcttacaaaatacaacgaaaaaaggcttgcaacatacgccaatatgcagtaaattactaatcaacggggagggaatgaccttccccactaaataaagtccttaaactacttcctaaactggagaatctaaaaatggcaactatccgcgctactgttaacgagttcggtttttcctctctggatgttaaatttgacattgcaggcactgataacgcctttgaaatggtgaaaggtcttatcagtcagaccatcaaagattataatccttcggatgagttctgggaggaaacaaaacaagaagttctcaaggatggttatacttatcactattggggagaaaaaattgtctccctgtactacaacaaacaagattataactaatcgacgcagcggggctatttagccccagatacctgaacagcccctatttaaaggggcttttttacgtctatcgaatccttatacaatccctttccctcacctttctagaatctatccactgattcgatagaatctatctcataccttaaaagcaataactctatagtctattctatagccttttatcaaatcaacttaaatacaagcccataacccgaaagggaagggcaacccctaaaacgctctataaagctctataacagccttatcaacctaacttaagggattgcattaacctatcttaaaaagctctttacagggctttatagaggcttaaaagaatcttataagggtgtaagctttatcatctcgttagttatcttgtgaactactaaaaagggcttgttattgtcttaaaagtatgttataggggctataaagttactttgaagtagcttaaaagttacgtaaatgctagcccccttaacaatttcttaacaatccctacatagttatgcttttaagacacttgttagcaacttgttagccccttgttaaatctctgttaagaccacgtaaaagccttgtaagagtctttgacatagccttaaaagctcctgtgaagccctataaagagttatctgtacagttggggtgtaactactaggaagagacttaaaagagcttataaagagctatagagagcttttaagaggtatgtttaaggaatcactaagaaaggaaagggaacgataagaaagagatagtgaccatgttaatagctagttaaaaagattaaacacttgttagaaacttgttaattatcttaacaaaataactctttaaaattaacttgttagctcttgttagtcatctgttaagattctgtaaaacctatgtatcaactgttaagaaactgttacagccttgttagttctgttaagaatctgttaagacctttgaagagttgttaagaagatgtgagaactgttaagagattgttaaggatattttaaaattttgcaaagtacttgtaagggagctgttaagggctaccaagcagatatacatcctaatcagatatttttgagttccttcaaagaccctaaaaaatgacttgacagtcttattttataaaaattttaaaattctgaataattacctacacagtcttttaaaaatacaggtagaaacaggcttataagataccttgttagtaccgtgttagaccttgtgagataaggtctgtaaagatattcctgttaagtttgttaaaacagactatatagaggcttagtatttcctagtgaacacctatagagagtgtcataggtaacatagagattaagaggtgtataggagcttctaagaaggtgtagagagatgtttaaggtgattgtataggttgttaagaaggcttgttagaagagtgtttagatggctatttagaagggctatacagagggctattaagaccactagatagttactaagatactatatagtactatataactatatatagagagtaagattaagaaggttgttaagaaggatagatattttattcacatatgatggtgacccagaggttgggacaaccgataaaattttataaaaattaaaaagcccccgattaaggaggctcttaagatattttaaatcaggctttctaaaactgtcttcaatgatgacttagttgtctgataaaaatgagtgaatccattgttgttatcgaatatctgcatcataacagcatctcccttgattgggtacactcggatgtcatagtgaaatccattaaagacagcagaaccattacagaatacactaaaatcatccactgagatatactcttcatgacctgtgatttttatacagacacctttactcggtctcttagggttgatatcttccataatagacatactctgtccaccaagagataccatagtgaccactttacggttcttctgtttaaagtacattttaactttctgcaaagtgtcttcatagaacggataagacctttctacaaagattccttcaagtggctctttaccattttcaacttctctgttatgccgtacttcaaagataatttgttcgaaccagtcaagattttcttcggagagtgcttctcgaacatcactccagtcaagtactaggtagttaccttcaacttcttttaagttatctttttccatatctatcacaccattatcgtaaaacttgatattctggtactgcgaatttattactattgttcttgatgaggtcatcctctgaaactaaaaatgtaataccacataagtgtctgtaacgactatcatactcgaatatcttaaacagatatttaccatcatgataaacctgttgcacttcaccttctgcaacaatctcgcctgtaataaaattttttagtttatacacattaccaactttaggtactgttttcatctcaggctcttttagtgctacacctatttttgcatcaccgagtaaatgagaactctcaaaagctacgtgtttcatataagcttctgagcattcccagataaaacagtgtacaagaaccttagcagcatgtcttgaacagtttaacttatcacaaatttctgtgtacatctcatctttagtcgagttgtcaagcattgctctttgcactatctcttttactttcataagctctccgaataaccctattaagcatctctaaagtcagttttccagactctaaatgtggcataacaagctttaaagctttttcaacatcatgcacaacatctattataccttcttcataggcttctacaaggatatcttttacgttttgttggttatctttttgtggtattgctagacgcatattaaactcatttgcttgagggtggtcactaccacgccagtaaccatctttgttaaagctgatgtagtcaccgtggtaaaagtgtacaccattagctttaaacttctccagcacaaggcattgaattgggtactcagtattccactccctgactcctataaccttcactgttgcgatgtactcctgtgtttttgcatctatgatgtcaagttcttgaccagctatgatttgcatattcgctaccttctaagtttctacaaaggggctatcaagtaacccctcaagttattactcagacttttcagtcttcttgtcggatttcttactagtcttcttctcagctttctgctcaggctccttctcagaagttgccttaataaccatatcaagaagctctgataagtcactcttcagtaaagtaacaggctgctcattgtagaagtttttgtcaagataaactttaaactcttctatagaaggaaatccaaaaattggtacaggtgtcttaaccattacttagtctctccataagcatctttcaagattgccttgttaatcatttcagcgattgcaaaacgaacacatacagctataattgtaggttgcattctttacttacctcttcaagtttaacttcagagtccttaagtcgtttcttatgaactctgaatctcattagtgagatgatgataccaactaaagggacagcatacaagtaccaaacatcatatacctttgcagtaatctgtgtaatggtcaaatcttgagctatggaactgattgctgatactgccagtaatgttgccaagaaaaatgccagtaccattactgtactcaaacaacctctggcatggtgttcatgcttaatgcacttattcttttcgtcaacaactctgttgtagtcgtttgtaaagtctctgtagaatgctttcaagtattcttgagtgtagccttcaaagcaacctgtaccataccaataatcaccaccaaaatgtgctatgataccggtatctccatttggttttgttactcttagggagacatgatgaccagtcttctggtaatctatcttgtatctttcttcgtaaatcattttccaatccctctcaatcgtttgttccactcaaggtcaacaagtctttgtaggactttacctctaggtgttacaccttttaaatctgcgtcatagcaatggtaaaaatcaccttcagcgtgtctgccatagcatcttcttatactctgacttctacgatattgttctaatagagacagcttgtagtaatcttcaactgtagttagttttttcattctttcaccatagcatttctgaactgacgttgagtttctcttgtaatttcgtctggagtaaaccctgctttcagcatatctctgaaaagaacttctaagtgattcttttcaataatgtaaattgcattctgcacagatgttttaagttccttcaggttactgctaatttcttcgcacttgttgacaatctctgtatcaactttcttaaagactggcatggtatatctactaccaccattagcagcatccatgaaaaatttaaaagattcctcagagtcctttaaagcaatccctataaagttcttgtaagcacctgtgaaagctaaagattcaatctcagcagttgagtatacagttcctgcacacagtcttgcggaggtactaaatgtgtggtttggtgttatgtcaaagtctaagttcttcagtggtcgaaaataaactatcccattgtgtgagatgtgtgttacaacagcctcaacactctttgaaggattctgtttaacatacaaaataattttatcgtgttctttcactttagccatatctattctccagaaactaaaaagggaactacctctcgatagctcccatcataatcaatattgtatactcggtcaagagtattttttaggcagtaatgcactgcgcttgttactctcttcactcaacagtgcgataaattcatcacctttacccttccacggactaaatgtagggatgtgttctctgatagcatcaatcactgttttcagggcgttattttttaaccaccaatcagacactgctgatgctacaatataataagcaccatcatctgtgaagattggctcagagatacatggtgaaatcatagtggtgatgatagagccattattcatgtaatatgttcttttttcaaccttatcaagaagcttatggaggtctgcaaagagactcacaacttctttatggtcaatatctttttcaagatttgctctgtatttcagcagtgcagcatcaacctctttatcattgaatttgaagtattggacttcttcattcacacatacactgatattgttggtgtttatcgtcaatttgcacagtttgactggagaattgatgttagtctgaaaaagtgctacacagccttctacatttccgaaatgttttactaatgtaacttctggttggatatgctcatgttcttctgacattacagtttcctcattaaatactttttaagttgtgtgttaggtttctcaaaaacttctatagaagatatcttaacagactcaccacgcataccagtatgtttgaatatgtagtactctagcatccctatgtactttgctggtaagtcatgcttgacatataccgtcacagaatcttcaaactcaacaacctttgtaccatctttgtagttaaactctttaggatggttgtagttgtctatatcgtacattaaaaagagtcttttacgttgtaagtcaagcttatttgttaaagactctttaatatctgagaagtttttgtacactatgacatggagcttactcatcgttaaactctctgacgaagaaatagttgactttgttattacctaccataaggtcaaagcaggtattttcaaaaggtttgttgtaggcatcgtatgaaatatatgggtcagctacttgcttagtgcttaacttcttacttgatgtatttaagaggccaccatacagcttcttgatagcctcttctacaacagaccagataatttcgtcagtaatttcttcgtacaggtcaagttcacgctctagtgagaagtcacaaatagggaaaacaacctgtactttactcattaacgaataacctgtgagacttgaattgcttcagttactgacaagtcacctactttctcttctttgataaaagtgaatgtgagttcaacaggttcttgctcttcttgctcaactggaatgccattaagctcatcgcggattgattgagttgtccagtcttctccaccatctggataatggatggcgtaaagagggaactccatatcataccagccaaatacagggcaaccatctgcatcatctcgcattctgcgaagtgtgctacctgagcctgtaaagcgaagactaatatttccattacactcaaaaatcactgcgtcggcaagtccagcatcttctcgaccatcatggccaaaagtgtcaacttttacttgaatctctttattcataaaaacctctctctgcttgttctatttttgctcttaaagcttcgcaatgttgtaaatgatatttagcttcttgttcatgtgttgctaactgcctttccagaacagatttatagtaacctgcaagttgctcttttgtcaatgggtgctctgaaataatatcaagtccactttcaccaagagggttgaattgtccatgttcgttgacattgtaagtctcaaacttgaacaggccattgttcacagactcaataggtgacaactcaacaagctctacagtaaaccgtgtatataccttgtcacctcttgaaaccacattgttcccgacaatgcgtacaagcgagccattacgagtgtacttaaaagttccaaagtcactagcccaaagtttcatagctttctccttagaaaataaaaaaggctcccgaaggagcctatgaagatattactttggatatacactgtcaagataaatgtcagcttccatcctacgtctgtttttcaggccgtttgaagtgaccttcttacctttgactgtaactttgttccaccactgcatagcttctgcacaacctaccttattaccatcgttgtggcgcttgataaatgttgagtcctgcatagctgtgataccgatgttgtatgtttcacttacaagtgcatcgaactcattctgagaagttggaaccttgatagctttgttcactgctgcaacgaacttttcaacatccgcgagaagatactgttcagcttgttcagcggtgattttcattcccatcttaacaggcttaccagcaatacggatagtcccatatccaattgtagggattccagcagaatcttcgtaagcctctagcttaagaccttcaaagaacttaatagcttctaaaccttttcttgagagttgcattatgcctcccctgctgggttaactgtaactgttgctgcattggatgttacagagccacctgcaccagtaactacacaggtgtaacttcctgcatcagcagtggttgcaccttctttggtgtaagttgcagtagttgcatcgaggatgtcttcctcacctttcttccattggtaacctgtcgcacctgttgccacaacattcaacgtcaaggtctcaccttcagtgatttcttgattggttggctgttgagtgattactggaagtgcatttacagtaactgtggctgcgttagatgtgacagagccacctgcacctgttacaacgcaagtgtatgaaccagcatctgttggcagagcaccagacttgctataggtagcatttgtcgctgaaggaatgtcagagccatctttcttccactggtaacccgttgcacccgttgcagtcacttccaagctgatgtttccaccctcattgatggtctgactagaaggttgctgtgtaatcacaggtagtgcgttaacagtaactgttgccgcatctgaggtaacacttgtcccagcctctccagatacaacacaagtgtataaaccagcatcagaaggtgctactgactgttttgtgtaagttgcagaattggcactagggatatcctcaccatccttcttccactgatatccagtggcgttagttgctagaatgcttagagtaagtgtgtcaccctcattgactgtttgacctgttggttgctgagtaattgctggtggcttgatagcatccttcagcttagcattcaacattgagaacggattaactcttgccaaccattcacagtaaatagtgtcaacatctttaccattgatgattgcatactgcaaatccatgaagaaatcagcagttctcatctgtgcaccaacactgtaaaggagttcatcactaaaaggaactttatagtctggtttatagtcaaacttctcaacttctgcaatatcagcttcaggccaatacgagctataggtaagtggtaaaatagcctcttgatatgttctaaaatcatacctcttaccagcctttacgtttgcaacgaagcccttcacaaactctttgaagtctgggtaagtctttgctttaatcatttcttttcagcctctaaatgtgcgtttagtctaaaataacctttgtgattcggagatacatcaccaacaacaatacctttaaccttataacctttaccaattacatactgaatatccataaggaatcttccaagaccaacaatatggaacattggatataatagattctcagagtctggaatattgatttctggtttgtaggtgcgttgttcgcttgttggtgtaatatcttcttcgggccatttactgagtctccatgtcaaaggtgttgggataacatcattaaggttgtacctttcaccattttgcacggaattgatataggattgtaggaagcaataaaagtcttttgcactcttagctttcattaaatatccttataaatagttaaaggggcatcagcccctattcacacttaagctttggtcttaagtaggttcttaagttttttaagattcatactctcatcaaacttaaaaccaaatccattgacataatcaatgaactcggatttcttactgagtgacaatgcgtaactcatatcaaagttcttacttgtttctgcgtctggactagagttcacatcaaatgaaatttctgtaggctcttgcttactttttctcatattatcaatcaacaaacatgtatagtttgctggatagaaatttacactaccatcaacgtagctgtacttattattatggataaggttggaaaataccttaaggaatgtttctgagtcgtggcaaacaagtttgaattggctgctctctccaagcgcaactaatgagtacggactttcactatcaaagtcataatttggattcgatgacgtcactgttacacgcatcaagttattagcaatagtcttctgtttaaaagaattttgaacatagtgaagacccctctcacactgattgactagctctttaagtaggtcatttgcatatggtgagttaattgatacagagccgtcactattgtaattaaaacttactgttaacatttttcagttctcctgcgatttataattttgctgcaatagagaaacgaagtaaactcactggaagaaaccactaagtgttgttcactagattgagccattgccctgaaatacattccagtcaaagcatcatagtgactattctttccaattgaggttatatagccatgactctttgcagtttgatataaatctataatatctgcgatttctaattgggaactacacatagataatcctcttgtcttctgtaattttgaaagaacaggtacagaccaatttcagaggatgaatagtagattaactctaccctttttgattccttacagtgattggtattcttacctttcttcggtttatttgattttctcattaagtctcctttgtagaacaaggcagacctacagctttaagtaagatggtacagtaatccatacaacaagtcaagaactattgcaagttaaaaaagttgttgacaaagtacttgacaaggtgtaggcttataaatacttagaagataacttaaaaggttcctctaaaaaggctatttaaacagatatctttctggatatctatcttttatcttaaaagccttttaagaggtcttataagaggcataccaatgaaaaacagaacaaacaaaggccagtttaaaaaaggccagtctggaaacccatctggaagaccaaaaggctctcgtaacaaaagttcactcgtaaaagctcaactgaccattgataattctgctgagtttgctgcaaagttgtttgaagcgattgttacaagggacgctgctaagcttgcagagtttgggttaaacacagacgacgtaaccatcaaaagcatgattgaggtcggtaaaactatcatgacccactcagcaggtgaaatgaaagcaattgcagcagacactaagaagactcctgataatggtggtcagtctcagacagacaacaaaccaacgttctctgctgttgcaacccttaaaaaataattttaaaagatgttgacagactctataaagttgctctaaagtctgtcacatcaaacaacaaatgagagaagagagtaaaatatgagcgaattatttaaacatgcgcaccttcatgcaggtcgaactgaaaatggtgctgtaaaccatacttcatcaatgtctgctcttgtagacttttacaaagctgctggttcaagccgtagcaatgtagaaatcttaccagacctgttctacaaagctttgcgtgaggatgttgatgttgcagttcgtattttgcttcatatgcgagatgtacgagaaggtatgggtgagcgtaaagccttcagaactgttttgcttcaagcaattgaagacaaagttttagagtctacgcaggttcttcgcattatggataagattgcagaacttggtcgttttgatgacttcaaaatcttcgtaggtactcgtttcgagacagatgccttcaaacatttagaagcagcattactagaccctgcaacagcaggtttggcggctaagtggttaccacgagtcaaaccacgtcataagcagtttgtaaaacgtttctgcaagtttgccaacttgagtgagaaagagtaccgcacactgttgtctgcactatctgatacagttgagcaaaaaatctctgctaatgagtttggtaagattgactacagcaagattccttcacttgctgctgcacgttaccaaaaactgtttaaccgtaaagatggagagcgctacaaagcttacattgagtccttatcaaagggcgaggctaagattaatgctggtgctgtttacccatacgatgtgattaaatctgttaagtatggtaatgcagatgttgctaatgagcagtggaaagcactaccaaactggatggcagaaggtgaaaacatcctatgtatgactgatgtttcaagctcaatgtcttgggtgaattttggttcaatcactgcacttgatattggtgtatcacttgccttgtatgtagcagaacgcaatacaggttgctttaaggatgagttgatggtttattcaacaaaccctcatttcattgaactgagtggtgatttacgaaaccgtcatcgtcaggtgatgcgacacgttgaatatggctcaaccaacttacaagcagcttttgaccgtattcttgagacaggtaaaagaaacaacttgactcagaaagatatgccaagtaagcttatcatattctctgatatggagttcaatcaggttgatggagctaacggtcgtacaaactttgaagcaattcagagcaagtacaaaaaagctggatatgagatgccacaactggtattctggtacttagcaaaccgtaatggtacttgcgaagtgtccgttaaggataacggtgtagcaatggtatctggtttctctccagccactttaaaagctctgcttggtggtgagaagtttgacccaatcagcgtaatgctcaaagcagtaatgattgaccgttatatctggtaaaaaagttttaaaaagggtattgacaatgtgtttaataccctttaatatgttctacatagaaacgaaatgagagcttttctaagatactgaaaaatattttaaaaaagttcttgacaaccactaaaaaataatgttaaagtggttacatagagtttgaaaagtttatctctgtttagctcagcttggtagagcgttccgtttggggcggtaaggccggaggttcaagtcctccaacagagaccaaattaatgttccagtagacaaaatggtaaagtcaccactctttcaaagtggatatctgagggttcaaatcccttctggaacgccagttttgacagaagaccaattacagcaaacttaatcttattcatctgaaggtaaatcggacaaagaagagatttggtctggtcattaagaattgcgggtatagagaaagggcgtctcacatgtctcattagcatggtatcggcaggttcgactcctgcacccgcctccaaatttacagaagaccgtttacagcaatatttattaaatttttagcggaaaaattgaaagatacggtctggtaatactaaacatggttaggaagcacataaggtatgtgcggtcgcctgttaagcgaatggcacagggttcgaatccctgactaaccgccaaatttaggagagaagcgattgctcaccgatttgtaaggtgcaagtccttagcctgaatagaaattaaatgtgtcgttatcccgtagatggtagcggtggggactgtaaatcccttgtcattgagactcggtaggttcgactcctacacggcacaccaataaaggttatgtagtttaatctggttaaaatactcccctgtcacgggagatgatgagggttcaaatcccttcgtaaccgccaattttgagagggctatttagcccctcccttaaagggttcttacgagtatcctttaaaggagcggaagaccaaatacagcaagtacgtatgatattttcaagccaatttaattttgaaaaatttaaaacttggtctggctcaacaaatttacagaagaccgtttacagcaaaacttaaacaatctatttctccggtaaagaaaaggtgaaggttcgattccttcactcggcagaggtcgagttggtgtaatggtagcacttaagatgataaacaacggtctggtaattatctttgtagataagttattaagcttacctgtgagtatgcgaccacaaagggtgaaagggtaaattctagatttaaacccaaaaaggcacatcgctacagaccttaagcaagtctgggtagcttatctacaaagataatttaatggaagtgtagcagaatggtgatgcggcagacttttaatctgacaggcgatgggttcgaatccctccacttctaccaatatggttcagtcgcagataaggtaatgcaggggtttcataagccctatgaatatgggttcgattcccatctgaacctccaattgtgggttagcataaatggtaatgcaaacggctgataaccgttagaagagggttcgataccctcacctacaaccaatttcaataaagttgttgacattgagatgtgactactttatagtaaccttagttttcgttgcgtagcgtctattttgcaaatttaaaataaatgcaaacgacaatgtttttctggcagtagcttgataggctaaacaccagtgaggtcttccaatccctcatcaaagaatttggcgtactcgcccacggtatgattaataaggtgggcatctttaagggctttctaagagagtctttaaagataattacggggcgtatctcagcggtcttctaaaccgccgttaaccgagtaagtggagtatgcgggttcgagtcctgccgcctcgaccaatttagttagcagattacttagacgacctaagcgggtcttcctgtagggaggtggtctgtatctcatgttttccagaacatgtaaataatctgagaaggggctttacagtgttgagataatacggtaagcttcgaattatagtatgggacgatgttaagactctaaggcatgagcaacggcctccaaaaccgtttcaaaggggttcaactcctccgtcccatgccaaagtcttattaggggtaggtagcggctaatggcagccaaacagtcttgaaaactgttgccactgtagagatacggtgagggttcgactcctttacttaccgcctaataagatttttaaagccaagcttcattcggatgttgctttggtatccctcgtgtattgtcgtacacactgataaaacacctagtaggtgtcacggagaagagataatatcaagctctccaaaggttctagtcaccggattaaacaagactatgcaaagaccttttaggtctttttagagggcttctaaggttattacggcttgttgtggaaccttgttgcttaggttcttagaagttctctaaaaagatttaatgggagattgacggtaattggtaaacctaccatccttagaagttggtgtttgagggttcgaatcccttgtctcctaccaaattaatgcaggtgtagcaaaatggttatgcggctgactcttaatcagtaagacgatgggttcaattccctccacctgtaccagacattggggtcatagtttatatggttaaaattcgagttttgcaaacttgggaactgagttcaattctcagtgactccaccaattagtgcatccatagtttaaacgggaaaattacagtcttccaaactgaggttgagggttcgattccctctggatgctccaaattaatgctgctttcgtataattggctattacacatcccttgtaaggatggagatgcgggttcaagtcctgtgagcagcaccaattcagaggtcaagtgaaagaccgctttgagtcaactgaagaccgtaacaaattccacggagttgagttagcggcacaacttcagacctctttcacactcgcttagtttatatggtaaaacatcacccttacaagatgaagaaaaaggttcaagtcctttagtgagtaccatgttccagtatcccaattggtagaggatgcaagctcaaaccttgtactagtgacggttcgaatccgtcttggaacaccaattttgcaggattagttcaaatggatagagcaacagtctacgaagctgttaataggggttcgaatcccttatcctgcgccaatttaaagaggctatttagatgagatacttaaagtatgcttcatggattttcttagctttgttagagccatttgcagaaatcttagcagttatcttagcaccttttgtagttccattctacagtgagaagaaaggccacttacctttcggatttagatggatggagacatatgacaacccaattgatggtgacgaaggtcatatcgaacgatgggctaagattagaaagattggtaagctgggtgtctacatgcagagagtcggatggctctggagaaacaaagcttataacttctcttaccatgtattaggaagagatgtaaaagatgttactaagtggaaaggtaatatcaacgtaagttctgaccctgaagataatcagacaggttatctcctaatgtggaacagtaatgcttggggattattcgcttttatcccatcaattaaagtctttggtaaacagttttactggagaatttatattggatggaaactaaaaagtgttgtcccagaagaaagagcattctcaaggggaagagttatgttggcattctttattcatccactaagaaagtaaagatttaaaggggattagtttacaaggttaaaacctcggtctttgaaatcgaagaagttggttcaattccaacatcccccgccaatgctccattactccaattggcagagaggccagacttaaaatctgtgttatgtatcggttcgaatccgatatggagtaccaaatttagcggtatagcataactggcaatgcaacagtctctgaagctgtcctattaaggttcaaatccttatgccgctgccacttctaagggttcttacgagagtccttaaatgtggccttatcataaatggtaatgacccatgctgtgaacatggtctatacgggttcaaatcccgtaggtcaccccaatttatagtccaagtagcttatatggttaaagcgcgtgtctgaaaaacatgagaagagggttcaaatcccactggactaccaatttcaaaggtgcttaatgaaagagatgacagaacaaggtaaggagatttttaatctcttaaaaaccggtaaagggttttctaacccacttattactggtgcagcagttctcggtggaaccgtagctgcttctacatcacttgtaagctctattagttctgtaacagaccctacaatgcaggagaaacttgttgctgctggacttacaacagtccttctaaacagctttacaacaagccttacaagcactacagcaactactaagaccctgacagactacggtcaaaaatctattgatgagttttcatcacgtatgcaggtagcaaaggggtattccaatgttatgggtgcagcaggagaacaagttggttgtacaccgttcagtggtattatgggtgttgctacagaatatggtcaaaaagctattgatacaattaacagtacactagagagtgttaacgatgtattaagtgacttacaagacgctattgatgagggtcttgatactatttctgatttagctaatcaggctgttagtaagattaatgaaggtatttcaaagattacagcttatgcagatgaagttgtgcagatgattgaagaagaagctgcccttattgcagagtaccttaaaacgaatatcaatgggttcttagcaggtatcttaccagactggtttgacgatgcctgtaaaactggtgtaattgacactattgcaacaccagaaatgaagaacgcattacagaaataaatggaagattaaccctaaaaggtaagggagcagtttgctaaactgccagtagctgagaaatcggtgtaccagttcaagtctggtatcttcctccaatttgaatccgtgacagaaatggctatgtgcctgtctgcaaaacaggtttataagggttcgagtcccttcggattctccaagttattttactctctctcaattaaaataataataataatgccctgctataagtattcttcctttcgctaccgaagagtatttttagacagggcttttttacagagttatactttataagaaggcttatacagtatgtctctgacgtacattgtggtttctccttgacggtctctgtgccgtcttttttaaggggaaacatggttaattatttggagaaaacataatgagtgagaccgtttacaaagaactttatgaagctaataaaaagctagaatttatgcagaacactatcatggcaattgcagatagattatctgtagcaacaggcattgatattaaagaagcatctatggatgcactccttgatgctgttgatgaaaagttcgaagttaagaaagaagagactgctacagactctgaataattctatttgcggaggcgcttaatggacttaaatgctgttaagcagaagcgagtggaagatgttaggaaagtcctagctggagagttggggctttctgatgaagtaaaagaaattattaaatcattcggtaaagacccctctaaattccttccaactcaaattctgactttattaagatacacaccagaccaagttcgcctcatctttaaattgatgactgataagaactatgtagcccctcaaccgggttctcaagaggtctttttaaatactaatgctgacttggttctctatggtggtgctgctggtgctggtaagactgccgcattgttaatggactctttaagatttattgaagaccctaactataatgctgtatatttccgtcgaaatacaacacagttacaaggtggtttatggcctgctgcaaagaaactatttggtaagtttggtgggattcctcatgagcagaaaatgactatcacattcccttctggggcaactatcaagtttacctacctagaacttgaaaagcacgctgaaggtcatcagggtattgaatactcagcaatctactttgacgaaggtacacacttctctgcttcacagatttcatacctacagactcgtctgcgttctggtgctgaaggtgattcatacatgaagatttccatgaacccagacagagaccactttatttatgattgggtagaaccattcttagatgaagaaggttatccagaccctgaaaagtgtggtcgtattcgttggtatgtaatgaatgatggtgtgatggtttctgattgggagagagacaagattcttgaaatgttccctcttgagattcctcaaacatacaccttcatctctggtacgattgatgataacccaattcttgacttcttagaacctaagtaccgtggtaagttggaaaacaacacccctgtaaacgttgcaagacttcgtttcggtaactggaaggctcgtgcagaaggttcaaactactggcaaagacaatggtgtgagattgttgattcactcccagaagatgtatttgatgttagagcatgggacttagcagcaactttaccatctgagattaaccctaatccagactggacagcaggtgttaagatgggtaaatctaaaaaagacggttgctattatatcattgatgtagtaagatttagagatagaccctctggagtcgaaacacaaattaatttgactgctgaaagtgacggtaagcgaactggtatttttatccctcaagacccaggcgctgctggtaaatcctacgcaacatccctcatcaggaaacttgccgagaaaggctatcgtgcaagagctaaaccaacaaataaagataaagttacccgctttgcgggattttctgctgcttctgaagctggacttgtaaaagtcttgagaggtagttggaacgaagcttactttcaagagcttgaaggcttttgtggtgatggcaaaactaaagatgaccaagtggatgctaccagtgatgctttcaacagtcttaacgaagttaaattattcaagccaccatcaatgggtgctcacacagacttagtgagaggaaacccatatgaggggcttagacgttgatagctaggtgagaagaatggcagatattacagaaacacaagaaagcttaccaccatttagaatgggtgaagtaggttctttgggtctgaaggttaagaatggaagaatctatgaagaacctcgtcaggcactaaggttccctgaaagtattaaaactttccaattaatgatgcgtgaccctgctgtagcagcatctgtaaatattattaagatgtttgtcagaaaagtcaactggagattcgtacctccaaagggaaaagagcaagaccctaaaatgcttgaaagagcagacttctttaattctttaatggatgacatggagcatgattgggcagattttattaattctgtaatgtcattctgcacttatgggttttgtgttaacgagaaagtttataagaagcgacagggtaaaaaaggaaagtaccagtcaaaatttgatgatggtctaattggatgggctaaattaccaatcagaaaccaatcaacacttgataagtggtattttgacgaagactttagaaaagttactggtgttagacagaatctgagaaatgtttcacatattgctggagcaattaatcttggagaaagaccactaacaagaaaacttccacgagctaaattcatgctgtttaagtatgatgatgaatatggaaacccagaaggtcgttcaccattacttaatgcctatgtaccgtggaagtataaagttcagattgaagagtacgaagctgttggtgtttcaagagacttggtaggtatgccaaagattggtttaccaccagattatctggatgaaaatgcagaacctgaaaagaaagctttcgtacaatactgcaaaactgttgttaatgatatgattgctaatgacagagcaggtttaatctggcctagatatatcgacccagatactaaagaggatatttttgagttctcattagtctctagacagggtgctaaagcatatgatacaggttctatcattgacagatattccaagcaaattatgatggcatttatgtcagatgttcttgctatgggtcagtcaaaatatggttcattctctcttgcagattctaagacaagcttattagcaatgtcagtagatattttgctgaagcaaattaagaacgtaattaaccgtgatttagttgcacagacttatgctcttaatatgtgggatgatgaagaacatgtacaaatcacatatgatgatatcgaaactccagaccttgaagcaattggttcttatattcagaagactgttgcagtaggtgctttggaagttgacaaagagctatctaacaaacttagagagcatattggtcttcctcctgctgatgagtctcaaccagtatctgaaaagctttctccaaatagccaaagccgctcaggagatggttataagaccgctggagaaggtactgcaaagacaccttcagcgaaagacccaagcacagcaaataaggcaaataaataatggctgaagttatctctatttcaaatgctacacgagtgcattcgtataggggtgtccttatcattactgataagttatctgtagaggctggctcaagggtcagcctttcaggttatgttagtgatggtggaatctctgacgttttcactatttgcaggttacttgatgcaccaatgagtggaaaaccgtttatttcaggaaattgtagtgaaattgttaaaattccatttgacagttcatgccttttgggtgtaaagttatataactgcgagaataaacgtatcaatgttaatagcattgaagccgctttcattaccctcgatactgcatttcaatctccaatgacagttaataaagaaacaaacagacttgaatacattttttcacaaaatgattacaaagtacttgtcaaaggtaaagtatatgatatgattgtaaatgtggtagatgaatctggtaaccattcaacagtccttaaacaaaaagtaaggtttaattaatgggaacattaactattgatggtaagaataaaatcctcgccacgctaaccccaacgactattattttacacaatgtagacccaacggcagaccctacagcaaataaggttactcagccagtggctatttatttttctgaaccggataatggcttaattgcctcagaagacacagttaatattactgtcccagcttctgcaacggtctcacactatagcttgtgggatgctaacgataaatgcgtggcaactggtgctcttagcaaacctcaattctttgctgaagaaggtatctatgttatctcttcagtctctgtagatttaaacaaatagggtgagtaaaaatgagttcgaatatcttcagacttgctgatagattattcaaccaacctttactagccactgaatcattagctcactcagcagcaacttatgtgaataacagattgctgggtgatgtccaagcagcagtaaactttgataaacccaaaggtgaagcaagaagtcttttaaaagtaaaagatgacattgctattatccctattatgggtggtttaacccatcgtatgacattcattgatgcaatgtgtacaggtggattaagctcttatgaaggtttgcgtagaggctttgacgaagctttagcagatgagtcaatcaagactattgttctgcacattgattctggtggtggtgaagcttcaggttgctttgaattagcacgtcacattatggcttcaagaggccaaaagaaaattattgcttatgtagatgagttcgcttgttccgctgcatacgctcttgcatcttctgctgaagaaattattgcatcaccagatgcagatgttggttctattggtgtaattatggttcatcaggaattaactaaggcatttgaaaagaatggcgtaacaattaacgtcatcaaagctggtgagtttaaaggtatgggttcaccattccaagcactctcagaagaaagcaaagaaagacttcaaaagagaattaatgatacctacgcaacctttacaggttttgtagccgaatctcgtaatctctctgaagaagctgtaaagaatactgaggcgaatgtttattctgctcaggaagctcttgaacttggtttaattaactcaatcatgtctcaagatgatttcttaaattacttacaaggttctgaagaggctcctgtaagtttaaacgttaacaattcaggtgaagaaatgactgaacaagaaaagcaagaactagaagctttgcgtcttcaggttgctcaaatgaaagctaaagaacaggaagctgctttgtcagatttgactaataagatttctgcttctgctgaagcttttggatttgatgcaaaagaagctgcaacgactattttaggtgctggtcttgataaccctctgagtgttctgtttatgaatgctatggaaggtgctaaccagaaacttaatgaaactatcgcgtcccatgcttctgcaatggaagaaaaagaatcagaaattaccaagctgaaagaaactgctggtgctgttcttgaacattccaacgctatggaagaaatgggtaatgacggcgaagctgatttggttgaagaagaaaaagaaccagctaagaatgcttccgaagacaccgctgaacaacgcaaactggctctccagaatgctctaaaatctcttatcaaataaggaacacaataatggcatatcaagattttactaagttaggtaaaagagaacctctgaatgatatcattctttgggaacaggttaccccaacaggccactctcgtaaagagtacactccacaggcatctacagaatatcgtgtaggtgaagttctgaaggaagacggtactaaagtcgcagcaggggaagaagctcaggctgattctgtatgtatcgttaacttttattcagacctgcaactgtcttaccacggtcagttgaaagttgttggtatttaccgtgacgcagaactgaaagacatgcttactcttgagtctggtgttaatgctgagaacgtcaagaaagctctggctgctaaaggtattgatttcgtaccaactggcctgtaataacaataataagacattctggagaattttacaatgttgactaattctgaaaaaagcagatttttccttgctgacctgactggtgaagtccagtctatcccaaatacttatgggtatatttccaacttaggtctgttccgttcagcaccaatcacccaaactactttccttatggacttgactgattgggatgttagcttgcttgatgcggtagaccgtgatagccgtaaagcagagactagcgcacctgagcgtgttcgtcaaatcagcttcccaatgatgtatttcaaagaagttgaaagcattactcctgatgagattcagggtgtacgtcagccaggcactgcaaacgaactgactactgaagctgtagtacgtgctaagaagctgatgaagattcgtaccaagttcgatattactcgtgagttcctgtttatgcaagctctgaagggtaaagttgttgatgctcgtggtactctgtatgctgacctgtacaagcagttcgacgttgagaagaaaactgtttacttcgaccttggcaaccctaatgctgacatcgacgcttctattgaagaactgcgtatgcacatggaagacgaagctaagactggcactgtaatcaacggtgaagaaattcacgtagttgttgaccgtgtattcttcagcaaactggttaagcatcctaagattcgtgacgcttatcttgcacagcagactccgctggcttggcaacagattactggttctctgagaactggtggtactgacggcgttcaggctcacatgaacaccttctactacggtggtgttaagtttgtccagtacaacggtaagttcaaagacaagcgtggtaaggttcatactctggtgagcattgatggtgctggtgcagaggttggtgtaggacacgctttccctaacgtttctatgcttggtgaagcaaacaacatcttcgaagtggcttatggtccatgtcctaagatgggttacgcaaatacacttggtcaggaactgtacgtattcgaatatgaaaaagaccgtgacgaaggtattgacttcgaagctcactcttacatgctgccatactgtactcgtcctcagttgctggtagatgttcgtgctgacgctaaagactaatattcttaaggagggttatgaatgtgttatacaggcgacccagccaataaccctcttgatagagtaagaatcctctgcacagacaccaataatgatgaaattcttattgaacagtctgtgctagagtggttctatctagaatctggaaaggatgaaaagaaagcagccatcaaagctcttaaatatttactctttcaagtagccaagatgggagatgagaaggttggtggtgtttatttacgtaactcttccagattcaaatctctgaaagctgtttatgacgaccttgttaaaagctctgtttcaggactaccctatgcaggtggtattaatcagtgtgacattgatatgcgtcgtcagaatccttgctctgtcaagaaatacacagaatatggtgatgctgccagatacgaaggcagagattactgcaaccgtgttaatggcgtatttattatcgagcgagatgaataatggttaaaagggttattcaccccgctagagcaaaattagtcggggctatgaagaacttgcaaacggctaatgctcaagttgggtattttcaagaacaaggtcaacatagctctggtttttcttatcctgctttaatgtatttacaagaagttattggggttccttcagcttctggtaaagtatatcgtaggttgtttgaaatcactatgatgctaaacagacagaccttgttagagcagactaagaagaatctatataagcaacttagcagtctcaacgtagacccctcagataccttagaagcatttgcaaagaatgctcaaaaggcaattaaaagaggttttggtaattctgctatcctccctcctaacgcaccttccacagtcaagaaaaaaggctttaatgcacctcttgttgagacaggtgacttaagggataaccttgcttataaaatttctactaagaagggtattaagaaatgagactcttaaacagacacagctttgtagtaaagcgtaaagtctctgaagacggttattataatgatgatggtgattgggtagcttcacaagatattgtagaggttaactgtaaaggtaatatccagccatatatcaaaggttctgtaaagaatggtacacagattgctttaccggaaggtattagactaaccgatacaagaatcctgtatactacatataaacttagaacttcagatgatgtagagtggaatgagtctgatattgttatgattgatggtcatgagtatgaagtatttatgactatggattggtcacagcaattagcccatacatcccattatgaatatatcattattagaagggataaaatgaatgcagttagaaacagcagaacttgaaaaaggtctagttagaaccttagtggatgttattggtcacagattagctcgtgataaaaataatagaccaaacgtaattagagcttacccttctgataactcaaatgacaaaggtttaaaacctgaccagccatttattaccgtatattgtcaagatgctgcaacaccttatggttgggttcttgataagtttgttgaagatgatgtagtttgttacagaattgcttttcagattcctgtattaattacggtaaatgggaaaggtgctcacagtattatgcttgagcttaaacaacgattagagatgagttcagtcagggatttaattcttgaagagacaggagctacagtgctagacactggagccatcccaaatgactacacttatctcaatacagatttcgaaaattctgcgcctcttgttgtaactcttgtaaaaaattcagtcctgaaagatgaacgcggaagtattattgagcgtgtcattgttgatggcgagttggtttatgaagaaggacaagagccaccagaatatactatccatctagatgtagactccaaaggggtaaaataaatgtggaatccaattgttaatgtagatattacattgaacaccgcaggaactacaagagaaggttttggtttgccactattcttagcttcaacagataactttgaagaaagagtgcgtggttatacttccttaactgaagttgctgaagatttcgatgagaatactgctgcatataaggctgctaaacaactttggagtcagactcctaaagtaactcagctttatattggtagatgcgctatgcagtacactgtatcaattcctgatgaggttactgagagcacggactactcaattactgtagctgtcggtgggggaatgtcacaaccattccagtacacctcacaaggtgaagatactgccgagaatgtattacaacagtttaaaacacagattgaagctgaccaatcaattaaagataaagtttcagtcaatgttactggtagcaacggttctgccacaatggtcatctccaaagctggtgacaatgatttcgtgaaggtaaccactacagcacaaactgtgtctattgcaagcacaactgctgatacagcgtcaactgctctggcagctattgaagcttattctaccgactggtatttcattgcagcagaagacagaactcaacagtttgttttggcaatggcttctgagattcaggctcgtaagaaaatcttcttcacagctaactctgatgtagcagcactgcaaggtacagaattaaatagtgcaaatgatgttccagcacagcttgctaagagtatgtatactcgcacagtttgcttgtggcatcacacagcggcagaagattatccagagatggcatatattgcttatggcgctccatacgatgcagggtcaattgcttggggtaatgctcagttgactggtgtagctgcttctttacagccagctaataagagacctctgacaagcattcagaagtcagctttagatgtacgtcactgtaactttatcgaccttgatggtggtgttccagtggttcgtagagggattacttctggtggggaatggattgatatcgtccgtggtgttgactggttagaatcagacctgaaaacttctctgagagacttgctaattaaccagaagggtggtaagattacttatgatgatactggtattacccgtattcgtcaagtcattgaaacctctctacaaagagcagtcaacagaaacttcctgtcatcttacacagttaatgttcctaaagcctctcaagttgctttggcagacaagaaagctcgtatcctgaaagatgttaccttcgcaggtatcttagcaggggctatcttggatgttgacttgaaaggtacagtggcttacgaataatagaggtaaattggaatggctatgtatcagcaatattcccctaaagacgttgtatgtagctggaatggtattgccattgaaggctttgccccagactcatttttacgtctacagagaacatcaccacttatcacaccagttgtaggtgcaggtggtcaggttgctctgacaagaaatgcagacaagacaggtactattgagattgagctaatgcagacttctctctctaaccagatgctttctgcaattcaagctaaacaagacaacatggaacttgaagaagatatctcttctaacttcgtaatctacgacccatcaggctctgttctggcaactggtattaatgcttggttgcaggaattaccacagattgaacttgggcgtgaccagaactctaaaacttggatttttggttgtgagaagctagactacacttctacaattccagcgtcaagtgtttaataaatcctataagggggagactttaaaaggtcttccccttttttgtttcttttaaaagtattaaggaatcacaatgaaaacagaatctagagtaattaatggtaagaaagtaaatattgttctgcttggggcaagagatgggattaagatgtctatgaagctgggtaaaattgttgttccaacatttgcacagatgctatcaagtctgactgataaagataagaaagaagctccaatggttccatttaaagaccttgttgaagcttgttttgacagaattgaagaaattaaccttgaagaaatggctaccctgttatttcaaggggcaactgttgatgacttcccactcaatattgatacatacttccaagcaaactacggtgagtttattgattacttagcatttgcgctggaggcaaacttcggaagttttttcgaagcaagcattttcaaaagcctaacttctcagtaaacatgggtaatactctacagacaccactaactgatgctgctgtagaggcaacctatgaagaagcagacgagatgaaatttgtgcttgctatttatggtatggaagggtgtaaagaaacacttgaccaactctttgctatgacattctctgatttattatcattgagacaatttcttgaaattcagaggtcgtataaagaggaaattgcttacaacgaacttagaagagcaggaaaaatgtaatggcacaatatacagttgatagcttcattgtggaacttggtttcagtgaaaaggttgttaagggcttgcaaagagttgagaaaatgtctatgcaagctgctcagcgtattgagcgaaatatcaataaagcctttgatgtgaaacctaataaaagttctcaggaagcacttaatagaattgtaaaaaatgctcagtctgcttcgggcagaatcaataaagcactcaacagttccttgaaccttgattcacaaggtgttaaatctcttaagaaacttgaaactcaggcaaaaaagactgcaaaaggtattaacaagtcattaagagatgctatgaaggttgacggtaaaatcactatcaagacagggagagggagaggtggacagagtatccctcctgttggtggtggagcacccagaggtccgagagtagatgttgctcagagacaaatggaaagaatgtttaacaacaacttctattcagggttaacccgtagactggaaacaatcggtggtcaaggtaaccaaatggcagcctctttcagaggaagcttgcaaaatatctataacagatataaaggtactggtaaggttggtgagtatgagatggaagttaaaaagctcatcgacgtaaccaaacgttgggttattgcagaaaatgctagactaaaatcagttaaagaatcagcttggctacaggatagagctaacgcatcattacgtcaattagttggtggatttgtttcagcttatgctttactggaactctcacaaaaaactattgaagctggtgtaaaaagacaatctgcacaattagcctctacagctatctttggagcagacactcagcaagctagaatgttcgctgcatcattcgcacaccaaattggtcagaactacacagataccatgaagcagtactcaaactttgctgctggtgctcaaccaacacttggctttcagggtactcaagagttctataagaatgctgcaatgtttgcccgtatcaggggtgctactgatgaagacttgaaaggtatcatggttgcattccagcagatggcgtcaaaaggtaaagttcaggctgaagaacttcgtggacagttaggtgaccgtttagcaggtgctgtgcagctattcgctgatgctattggtaagaccccacaagaacttgataagatgatgcaagacggtaaacttcttgctcaagacgttcttcctaaagtatctgaaagaatggctgaacttgtcaagcaagcaggtggtatgaatgctgtgtccaagcagactgctacatcaatgggtcaagcgaaggctatgtgggataacacacttgtagcactgtttaacaattctagtgagggcatttcacagttatctaactccgttgcaatgttcttgcaaggttctatgggtagcacgcaggctttaggtcttgtgattgggaacctgttaaaaggcgctagtaatctacttgacttcattacagacttcatgtacagaacatctgcactatactactatgcaagagcttggtataaagaccttgacaacagccagcaaaagcttatcaaaagtgctggtgaatttctaggaacagttgtcacaattggaggcgcagttgctgtagtatcaaaagcagtcaagctcctaagtggtttggttggtggtggtatctttggtaaaatcttacaaagacttggtgttagtgcagcaggtacagcagcagccggagaagcagccgcagcagcaggtggagttacagcaacgagaatggcacttggtactgttggttcagcattaatgctaagaggctctacagacccaaatgctgctaaaaactacagtgaagttacattaccaaaaccatttgaaaatgctgttgcaaatattacaaacccaaaaaggccaatgttctttgatgagaatggtcaacttcagtttgcacagtacactcaagacgttgaaggcaacagaaagttaattgataatggtctatctaattgggagattatcatggagaagctatcaacatctattgataattttgccaataagtttaaccagacaccaatgatgatgacaccttctggtttacctatgcagactaaacaaaccctgaatgttactttcaatcttgatggtaaacaaattgctactaagatggtggatattactgacaagaatcaagaagacattcttctaagttcaagctatccagaggaagaataatgttatgggattctaatatgcaaatcaaatatagtggcaaagacggcatctatttccacttaagagataatgtagatgccttcttaaccttatcagcaactgaaaatatggaatttgacagccctatgcaggtaactacacagaacatgcaatcagggcaaaccgtcacagataatgtgcaaagagcacccagaacaatcactattagtggtgtcgttgtagttggctatgaaggaagcttattattaactcgtcagggtcaattagtagaaaacttcatcgacactcttgaaagctggcgtgaccagaagcaaattatttcagtcatctgtaaagacggaattaaaattgatgattccattatcacaagttttaaagcctctaaagatgttggtatttcaaatggtctaagaatccagctaacttttcaggaaattaactttaaagctatcgtgggacaaactgatatttctgctgcaactggaaagaccgctaccacgaatgatggtggtgctaccagtaaaaagaatacagggaataccacaacaagtctaggtaatgggaaattaaactgtcagttattattcgaccttgatgccaatggagtaagggaacttactagtgctgaagataatgcccttgcaaaatgttccatgtctgcaaaaaccagaaaaggtgttactacattcagtgaagaggctgagaaaaatgccggagcagcattaaacagaactgctggagatggaaaagcattacaaaagcattcagtgaatccgaataaaaaggggacttattaatgtcacaatatattcctgttcctgatacaggatggtctacacaaactgtaactctggatggcactgtctttgtaattgaattaaagtataaagagaggcttgacagatggttcttgacgctatctgatgttgatggtaatgtattattatctgaaaagaaatgccttgcagaccaatcaatcacaggacgctatgtaattccttcattagctggagagctttttgttgaacgaatgtatggtactgatttacagcctaccagaaataacttcggaagagaaaaggcatttgagcttaattattacactcaagaagatatgagattaatggagaacttgtaatgtctgtaaaagatagcactgctggggcttcttttaggtgctatcaattggctgtaggtagtgaaactacagcctttaatgataaacctacaagccatgctaaagattctatgcaaatggactattttgacaacttacaatttacttgtaatgtgtcttatacgtctcagaagaataaagtaacctctgatgataccacttttgaaatctacaaccttaataaagagatgagagccaaattcaaaaccgttggtgcaacagttatgcttagagcaggttacactactggttttaaaagggacgcaaatggcgaccttattattgaatatgataacctcccattaatctatctaggcactattgaatatgcttatacatataagcgtggtgttgatatgattacaaaggttatctgttccaatgataaaatggaaagaaccacgattaagacatcaatttcttataaagcagggacaacgcgtaaaagtgtgattagagatttagtcaacagactaggtttctcacttattgatgaagacctttcaagtattgatagttacacttacaagaatggttttagtgtttggggaagtgttgcagaggcacttacaaaggtttgtgaagaaagtagtctacgttggtatacatttaacaagcaaatccgagtagttccttttaacgctaaggctagacaactttcttgggaaatttacccatataacgttattgattctttgcaaggctactacagaagaactagaaaggttctgaaaaaagagaataagacagttattaaagttaaaactggagttcgttgcaaaatccatttagatgggagaattaagatgggtgataacatcactattagggaaagtgaagattttgaaggtcagtatcgagtaaaaggtctttctcacaatcttgactttactggtggtgcttggacaactgaactagatttagagaaggtggaataatgaagtcaccagttactagaatgtctgggtatgtttcagaatgtcttgatgaatttagaaaagaactgtatactggattaccagccattattcagtctttcgattcaaagactcaaacagccactgttaagccactttactctattaacggtttacctatgccagagattactggtgtacctgttcaatttccaagtggtggtggggcatctttaacattccccgtaaaaactaatgacagatgctggttagctttctcaatgttacctttagatgacttcgttgtcaatgacaagaatgttcagatggaaacaaacatgagaaggacacatgatatttcagactgtgtagctttcgtaggcatctgcacaagaacacagaattttaaaccagacccaacagcagttagacttcatttcggtgactctgtgttaagagttactgatgatggtaacttctactttgaaggtgatgtacacatttctaaaaacttgtacgtaacagaagaagtacacggctcagattttatcagtgacacgactggtgtgagctttaatgaacacacgcaccattattactggacagaccctgctggtgaggctgatactacagaggcacaataatgaaaacagactttgcattaaatctaggtggtgactatgttgccactttaggttcagattcagtgtatgtggctcatggagatttaaagattactggtaaccaaattagaattatcccagaagatgataaagctactcaggttgctcaaagacttcatattagatgccttttaagggctggtgaagttttctttaatacatctgctgggttcccatatttacaacttgccaaatttaaacagaaaacttctatctttgataattacatgaaagcctaccttgttgaaacaagagatgtatctaacatctataactattcttcttcaatggataatgctcagagaaaagtaactgttaattttgatgcaactactacaacagatattttaacagacattacgcaagaggttaatatctaatggcaggattaactacaacaggattacaaactctaagatatcaggaaatttttgataatatcaaatcaaggcttcttagagatatttcaccaaaccttgacgtttctgaggatagtcagttaggtctctttctagcttcaattgcaaggtctttagcagacactcatgaaattctatcagaaatctatgatggtggaacgattgataaagctgaaggttttaaccttgatgatattacagctttaaacgctgtgtatagatatgttgctcaagctacaaggggtcaagtagagtttactggaacaacaggtgcaacaattccgtctacaaccagattaagaagtactgctgggaatatcttctatccagtttcaaacattacattaaccccttcatactgtgttgaggctattcttgaagttaactctttacgaactgatgcaaattatgttattattattgataacgttattttctcttatcagccaaaatcttcagacacaatcacagtactattaactgagcttgctaatgcaattaatggtggtattgtagcaaaagctgaagtcatcaatgatggttcagcattacgagtttataaagatgaaggcgacattattgcaagaaccaaccctatggtagtgactgctaccacattcctcacattcacaaaaattacaactatccatgatgttgttgctgaggaagttggtgcaattcctgcattagctgggacacttatcgaaattgaaacaactgtagatggtcttgatagcgtatataaccgttatggcctgacaacaggtagaaatgaagagaccgatacagaacttcgtcagagatatttagaatccctgtcagttactggtgtaggtactctggatgcaatcgtagctgctgttaagagggttcagggcgtatcagatgcttcaggtgttgaaaatgatactgaagagacaagctcagaaggactcccaccaaaatctttcaagattgttgtagttggtggtcaaaatgataatgttgctcaagcaatctgggacactaaacctgctggtattagagcttatggggctatctttgggacagcttatgacttaggtggactatctcataatatttacttcagtaggccaacacctaagtatgcttttgtaaaagtatcatactctctatataatgaagaaagcttgacaattccagaagaagatatcagagacagtattattcaaggtattaacgcttatggtagaactttgaaagttggtaatgatgttatccctaatagaatctatgggtatatttataatgtcattaaaggtatcgagattaatgaaatcaaagtagcactatccaatagccagtcagtaccacctagtgatggacagtacactacagcaagaattactgttgatggtgaccaatacactgtatgggaaagtagcaagtacaccattactaaggagtgataatgtttcagaaaattgatgatgtttattacaagactcttgatgaaaggactgttacacagtttaaagagaaattcatctatacgagtttgctgaaagctatcactgatgagctacaaacattggaagatgtttcatggcagatgcacactgaaaggaatatcaggaaggctattggacagcaacttgacaacatcggtgcattaattaaagtaccacgaccacttggtgctgatgatgaaacatatagagcaattctttatattcagatttttctaagacgttctgatacaaccccaacatttttacagaatgctatcatgactctgtatgatgcaacattttcacagctttttgaacatattacacctatgactgctggtattgtggttagagttaacacaagaaataacgttgttgacacagcatacacattagcaaaaattgctgcaacaactattggttcagcagtcattctaagagatgtaaccctgaatggtactgcttggacacctgtagaggttgctgactctgctttagcaattgttgatgataaagataactggcttgttacagatgctaacaagggtctggttaccaacaatacaggaggttctttagagaagaacttactagggagtttagcagatgctggtgtaagagatgcttatttcaagattgatagaacggctaatagtggctcagtagattacttgaaggttaataaaaattataatgctacagacaactacatcgttggtaaagaaactgtagcaggtggtgattatggtgttatggctgaagtagctcaaatcatcaaaggtagaaaagataaatcacagcaagaaggaagttcttaatggcatttttaaattggtctacagatgaagtagatgctgatggtaaccagctaaaagtattaccaccaccagaaattcaggcgactggtttattaagaggtgaaccaatgggtcgccaatggtttaattatatcttaaactatctcctgaagaaagcaaatggtactgttggtgaggtaaggtcttttgccactgcgcaaccagatttggtggctaatggctggaagcttattaagaccgaaacaggtactgcatcaacaagtacaaaaaatctttatacttatgaatttgtaggagcttaataatggcagtaggtgaaattcaaattagtgccttgcctcaagcatccttaccaattgaccttagtgatatcttccatcttaagcagggtattgaggataagaggtgtactcttgagcaattacttgctccacacgcaagcctaagaaataaccctcatggtgttactaaaacacaaattggtttagataatgttattaatgctcttcagttagtcgctgcaaataacttatcagatattgttaatgtagctgaggcaagagcaaatctacagattatgtcttcagaagaggttaataaccttgtccagcaacatatcaaggacaagagtaacccacacaatacaactaaggcacaggttggtttaagtaatgttcagaactggacaacatctaatctgtataacgaagatgcagataagtatgctacagcaagagcagtaaataacttgtacaaggctgttcaggcttcttatccagtaggtactatccatctttctatgaactctgcaaacccttccacatacttaatttgtggaggtacttgggagttagtttcaaaaggcagggcattggttggctatgactctgatacaagaccagcaggttctgtatttggcgcttcaactgtcactttgtcagttaataacatgcctcagcactcccactctgtgtctcttagcggtggtggtcacactcataatgcaactgtgtcaatttcagcttttgattatgggactaagactacaaactcttttgactatgggacaaaagctactaacacaactggtaaccatacacacagtgtgtcaggtaacactagcaccaatggtactcacaaccatgatgtgtatcctagagaaaatgatggcactggtaatgctgtggctgactctgatggtggtggtgcaagaaggacatcaaggacttctagtgatggtgcgcactcacacagctttaacgtcacatctggtgcatcaggtgaccacagccacacggttggtattggtgctcacagtcatacagttggtattggttcacatacgcatagtggcactgtaacagtttcttcttctgaacatacacatagtggcaatacaaatagtgttggtggaggtcaggcagttaatattgaacagccatccttcgtactgtatgtatggcagagaacagcttaatttctttacaggggctttatagccccttttaagaggaaaatttataatggcagattacaaattgagtgagctaaactcaatcgacacaatccgttcagatgaccttcttcatgtcagagttaaaaagagacctaaaatgctgggtgatgaagaccgtcgaatgacctatcaagatttcttagcatcttttaagcttgaaagatttgttcagattgctggtagcactatgacgggtgacttaggaattgttaagctactttacggtggcaaggctgtattcgaccccacaggctcttctgagattactgttggtgatgttttaaagacttttaaaatcaacgcaaacggccttaaactaactattgcagacgcttcaaggtcggcaactgtttatcatactttgaataagccaagccctaatgaacttgggatgagaactaatgaagagaatgacgcaaggtatgcaagactagccgtgaataatacctttagaggtactcaagctatcctctctgacaatgaagcgctcattattaaaaatatcactcaaggtgctccactctatcttcgtggtcaagatgcagatggtactaacagatggtatctaggtaatgataataggggtacaaataatcttgtattgaagaatgtaaagtctgacgtttcaattgctattttagagaatttggtgacagtcaacaaaacagtcagaatcactggacaggtgcaaccttctgattggactaatattgattctcgatacattccagcagctactttgagtaatcttgctaaactaagtgatgtaaacactttcaggtctgcacagattattaatcaaaatggcttattgttacagctaaagaatactacacaagatagccagttatactttgctggctttaatgctgataatgttagaaggtggtacatcggtaacggggaacaaaaaccagaaagtttcgttatccacaatgataggactgctactaccattttcatggtgaatgacttcttactgaacaaaacagtcagaatcactggacaggtgcaaccttctgacttctctaacttagatgctagatactatacccaatctgccgcaaacgcaagatatatgcttgcaagcatcactggttcggcttctgaagcagatggtggtgatggtgttgcatgggatgcaaaaacaggtctttataaggttactaacaccactggacagtcttcttcacttgtatatcacatgtttttagggactggttctacaccatctgcacaattaaagttttcgtttaaaaatggtgggatgtggtatagaacatcaagagatgcctatggcttcgaagttaattggtctaaagtttacacggaagcacaaaaaccaaccccttcagagattggtgcatacactaaagctgaaactgaccagaaaattgcaacagcaattagtgactctacagaccttaataaaatctatccagtaggtattgtaacgtggtttaacagtaatgttgaccctaatacagcacttcctgggttaacttggacgtacctgaacaatggtgttggtagaactatcagaattgcagcagcaaacggttcagatgttgctacaactggtggttcagattctgtgacgttgtctgttggtaacttgccatcacacactcatagtttctctgctaccacttcatcttttgattatggtacgaagggaactaacagtactggtggtcattctcactctgtaagtggtacaacaagtgctgctggcaaccacgctcaccacttaggtctgttattagttaatggtggtgatgctcagtatggttacacaactgttagcaacagcaagacaagaactcttgactggcttgatagaagagataacaagttccctaacactaacacaactggtaaccatacacacacgtggtctggtactacaagcggtgctggtgaccattcccactctgtaggtattggtgctcatagccacacagttagtggtaacactggtagcacaggttctggttcggcatttagtgttactaaccagttctacaagttaatggcttgggtaagaactgcttaatcccttgtatgcaggatagatggaatactaaaattatttataacgataatgaatacaccgagagtgtatatacaggaatgtacttctatttaatagatgaaagtaacaatagttgtttagatataatgggaaactgtaacgccattcattctctttggttttctcctatattagaaagacaagactttactttacttgacgttgagtatgacgtggacaggttcgggaaaatagcggggatatctattgatagcacgcctaatttagacaggatattaacagtaaataattgtgttaaacaaatagggtcgttcccttgctacaaaagattgagaaccaatagcaaatataggaattggcaaaatgaaagtaggctttacaattacccatattcatacgccatgatatgtgattacattaaccaaccatttgagatacaataccacctagtaccaacccataacatagatatatacgctaaagcgttcgtatctgacaagggtatgtattcattatatgttaaaaactataaaggtgatattaacggtaatatggaggcgtcaattaattcggcgcctttggatatgccagtatcatcaagtgcatacagtcaatacagttctagccaaaaagcgtccgccttatttaatatgcagacatcaattgataatgcgagagcgggcggttttcaatcaatggtcaattcggctttaggtattaaccctcttaatccgttgagcggtttggcgggaggtatgaacattggaatgacaatgtatagaacccaaatggcaacggaacaggctattggtcaaaagtcggctatggagaaagatttattaaacacaccacgtacaatggttaacagttcgtcagatattggattttcattgttaaactctaataatacaatgcaacttgtaaggtttggtattacagacgaatatttaaacaggttgggtgattatttcgccatgtacggctataaacaatcaaaaatgatggttgtaaattatagggacaggcattattataattatataaagacaataggagcgaatattacccctaattcatgggcgggaatacctaaagaacatttaagagaactaaaagaaatatttaataatggggttaccgtttggcatatggacagagaaggggtcgagttcctaaactacaattacgataattacgaggttgactaatgactgattgttaagatggtgttaatattctttatgggtattctcaccatcttggctgatgaggtgattaaatgcctacaatcctagcaattcttctaaaaaatctaggtagcttcttctggaaactcattttatcccttctaagtgaatacatgattgagaaagtgttctttaagcttgcaagataccttgcgagtaaaacagacacacctattgatgatgagttcgtagataacttagaaaaagcttttaagggggagaaataaatgaagtggctagaggaagcttttaaaaataatattggtgcaattgtagttggtatttttagtgttattgggatgtttaccacgatgcaggtttcaagtggtaaacaagaagtgtctgtcacaacaaagttacagcagctagataattattccaaaagtaactattcagctattcgtgatttacagtctgacatgagactgattcagctagggatggagaaccagaaagttcagttagagaacgttaagggtgagaatgcaaaacttaccaaaactcttgataaattctctgacagtgtgaataatctggctcaatcagtatcagccttgcaagctattactgaaaagaacacaaagaatactgaaaaataaagtttaaggctcctttttacgggagccttttttgttttacttgcctactgacagaggtgcttcaatcttccctgcatgttggtagttgttaattccaccaataaagtcacttgcagtaagatgttttaagtcacttaaagtgttaagctgtacaccaatctcaaaagtaggtgcatggaactcttcattgttcatcagttcataaacctgcttcatatggttctgataaatctgagtatctccaaagacacctatcaagtaccgtggagtgtatccagtcatcttacaaagaacttccagaataaaaccataagacgcaatattaaatggaagccctaaaaaggtgtctacagaacgctgataccattgcaagtcaacttcaccttcgttggtgatataaatctgaaacagaacatgacaaggtgctaaagccattgagtttgctgcaatatctgctgcattccaagcattaacaagcatgtaacggtctgtgatatcacctttcatcttcgttactaaggtttctaactggtctacaacacaaccattatgaccttcaaagcttctccactgaaccccgtagattctcccacctgcatcttctaaccagtcttgctcagaagaatagttagagcttaaccaacgtttaaaatcatctgaccagatagtccaacgttctccatcattttcaccccaagtgcgataacggagttcaccaagtttattctcaccattcaggaaccataaagcttccccaatgacttgccgtgtaaacacctgtttagatgttaagagcgggaaaccagttcgcatatcaaaacgaaactgaggtggagcaaatgcagagataacatctccagttcgtgtagtacgcagttcaccaacggataaaacatggttcaggatatttttgtaacttgaatctgcttgtgacatatcaaaagtgtccttttacttgtggaacataaatttcaaaagttgctttaccatcctctgatggttttgactgtacctttgtaaatacacggttatcatacagcttctcaaagaagttttcaaaaggtaaatgcacagtggcctcttcagtaactttatggaagactgtatggaacaccacaccagcatacggtaaagcattgacaaggacacctgcaccaccaattacaaagacatcttcatcaatagagctatcaagatacttcaaaaatgctccaaatgactctttactggctttagcatacattacatcatctttgccaaagtctatgcctaagtatggtacagaatttgttaagattaggcttgcacgttctggtagaggtttactacccagagtcttaaaagtctcattacccatgactactaagttatttttagtgagtctcttaaactcttgcatgtcctgtttatgtcgaggccacggcataccagttggagtaccaaactcaccattttcaccacttgcaaagattaatttaatcattttgtaaatcctttcttaatgaaccagttgataacactcttcacaactttactacgatggtagataaaatgtggagagggttggtatgaaccataagcccagaaagcgataatttcattacaccctgtgcatcgggtactttcttcagcaatatgaccgttgactatttcacttacctcaccttgtaagtctgtacacccgcaatgtggacaacggataggtgttccatcagactcatagcagtgttcaattttcatctatttaacctcaaaaactggttcaagaaccaatataaagtctacacagtcatcttcttcatccagaataccatcaaagttcttaggtacaaagtcgaagaggctcatagaatatcggtcagaagtaaccctgatagtgttccctatattctctacagttaatattgtacggctttctgttacctcacttagaagattactcacaaagtcatctaagaagtgtttcatcagtgacttgaagcctttagggtaatctgtaccagagtatgtttcaatctgaggaacaagcttaacatttatactagtctttgttaagaacgttttagagaacatgctatcaggtagcttacaaacagtctttccagtaccttcatgttcaatctcaacaaaaccagcttcatcgccacatgtaactattttaaaagatgcttcattctcatactgtgaagccataaactttttaagcatcgttttaaggaaatctgcatgggcatcttgtaagaatatatcaatcatagttaatcacctattatgggaacagacacttgatgtcatcgtttttgaaaacaaaacttgtgtagttatgaccatcaacatccagccaaacagcctgaacatctacaccatcaagattgtggtaaagctctttgatgaagtggtctttcacaatctgactgctagttgtttccagcttaatgttcgagattgctgaacctacagccatatagcccatgacacgtttcttctcagtatgcttaatcttaccatctttgtaagccataatgagattggagagaatcttcacaccataatatttttcaaggtgagtaggtacgccataaaagcctaatgcgaagttttcagagtggataatgttttcacgtttcatattaatctgccaaccttaaattgaaattaacaccaaatttttcacatacttccaacatatactcaagggagacgttaccagtgagatggattatgttggatacacgagcctgagagataccacaaattttagcaacttgctcttgagaaagacctctggatttaatctctctcttaaaacgatgtgcaacgaagtctctcatttcgtctacatccattggacaaatataactctccatttcagcctctctatcagcctcccaatcatcttgtggggcataagggtcaaaaacctcattcatctttcttcttccgtttgcgtgaagtgtcaattaatgagtctatgtttgtagccctaaccttttcacgttcatcgttaagataatcgtcaagagccttttcaatctgtgaatcatcttgacagataactgtaaagactgtaaagccgtctgtatcgtcaattatcttaccataaccgcttctgggatgtaactttttaagagccatatcaaatacctgtgcagcttctgttttctaagaaatactcaacaccatacatagctttttgcatcaaatcttctttaaactggatacgatgattgagcatagcctgtacatcaatatcatcagggtgcttctctttaatatttgcagattgcaggaaatactctgcaagaacacgatactgatagtcagttaccttatcagtcatctctgttaaagactcttcagagattggtttaagtagttcacctttagatagggcaacacctttaacaatctgacaagtgtcttctggaacacctgataagtccacatttggaagttctgttgcattgactggtaaattcattgccataaccattgcagcagctaataaaatctttttcataatgacctcaaagttatattgaattttgtattacatttagtataaaaataagctataacacctgacttgtcaacagattttatagcttattttggcagattttttataaggctactgccatccttccataccttaccttaccacacctaaccatacctaaccaaactacaccatacaataccttgttaaaagaccctcttaaagaccttttaaaaaggagcctccgaagaggctacctagtcaacttagaaaggttttctgcgttgcttgttaatgttagctttcatagcagctaagtggttttgctgttcaattagtcgtgaacgttcttggtggctaagtgccatagtgttcacattctcaattgcttgagtagcttgctttaaagcacgaccaattttaccagacattttacgttttgcaatagttgcttgatgcttaggttcaaccacacgataaccaacacccattgaagcaaccagataaatcttctcttctttaagaagcttctcaataaacttctcaagtcggtttagacgtgtaagagcataagccttcatttcatcttcgtacttaacaatgtcaccttgataagttggcttcacaatacctaagaaggtgtccatctcagagtgtgatacagtgtcaccataactaaactttgctgctaatgcttttgtattcataattaaacgttaccttctgaaataacttctacagaaaaacgaccaaagcgtggacgccaatcacctacaccacaaaggttgccagcattttccagaaccatcaggagttcttctttggtgatttgctcttcatcgaacatcaaaccaaactctacagaccagtcacggaagattggacggtagctcataactcgtgctgtgccaatcttaacagatttagcatagataaagtctggattcttagcaagttcttgtgggtttgctgggcagttcttgatagtcattgggaagactacatctgtcagcataatggctcggtcaatcaccttaccaagtttgttgagttttgcaccagacttgatacaagcctcaatcatctcaccgttcataacaaaacctagctgctcatcgtagtaacaagaggttaccagttgactttctgctaagagcgcatagtcttcgtcagtctttttacgtttactagacagagacttgtgatattttgtcagagggtttaatgggtctgacagtgtatcagcgtggctcaggaaagggcgagtaccagtgattttgatatttaacagtttcatagcatttagctccacactttagttgattgttaagttgtttgtaaagaaccctcaacagaagactctttagaaacttggtagatttttaacgtggctactaccatccacccataccttacctaaccaaaccgaacctcacacaaccagaccgagccgcaccccgccttattaaaagaccctcttcaaagaccttttaaaaaggtaagtctcattttaatgtagctgagactaactacccatactgtaccgcacctgacccgacctgaccagaccagacctaacattaccgtgccacaccgtaccgaacagaacactgccatacctcacatcacttaaaaaccctcttagaagactcttaagtgatgctggtgagtacccgttggtttatgctgctcagtatactcaccaaattttctatgtcaacaactttttatataaaagtcctgatagctatatgtgttacaaaacagaagattgtgaacaaaacacccattgcaaaagatgtgtccaaaagcttacttgcaatgtatgacaatacaaagacaaccagtataaacagaatgactgcactgaacatagtttactcataatccctaatagctagcccgacagggaactgtaaagaacccttacgagtcatcttctggaactgaaccgttaaaggcttcccgataaactcttcaggatgctcagcaagatactgtttcttctcatgagtagtcttccatgagacatctacaaagacgttaggaagagtctctacaacgaacttgccatgaccacgcttatcagtctttacaccagtcactttaaactcttcagtgtgcatcttcttgtgcttaatcaagaagtatgaacggtgacaacactcatagaaggagtcttcagagattgaacggtacattgcaccttcaaacttagcttcaacccacttatcgtgagcttcatcaaactcttcccaagaatttacacgacgagacttaacaggaacaactttacagccgtctctaaagtcattcaatggtgaagtctcaataatatctctacgctcaggccacgtcttagtactgtcacagatatcgtaccagtaaaacttgagcaagtgtctgtcaggattgtcttcatttttaatcatggagacgatatcttctaagtcccacccatgagcataaatctctccatcaaattcatcaacatctttgtggagccttaacattgccataatgtcaggtattagttcagtagggattttgtaaacagtattctcacgagaatatgctgtaaatacactgccaatactcaagtgccttgaaatcctacaacggacaccatcaagtttcggttgagcatcagcagggaacttcagatactttgcatggctaacctttgcagcatcatgagcaagctgtacacctaccttctcagtattctgtgcagaatcttttgtgtaagcataacctttgcggtcaacttgctttttatacttagcagcaacttcaaagagagcttgctgttcagcattacgctcattctttttaccgatgttcttaggctctgctgtgtactcttcaaacatcatcttgccattttctttaccataggttgtgataactttgtcacctacagcaacacatgaccagacgttgaaggaaccatctttattttgtttgtacagaattgtcatttttaacctctgagtgataccaagtgttgcaggcattacatgcgtaaagctctaagtcgtttttatctggtttatggaaacagtttgacccacaacgacaccggaataacttaccatcaacacgaagaatgaatgtttcaagctcaccatcttctgtaagaactgcgttctgaaatttattatctttacccatttgtactctcgcctgtgtcagattttatataagacctctcactacgtcttttaatgaaatgtacaacgcattttggtgtattttttacatctttaatgtgcaacctttcgaaactgtgtactgtgaagattgcatctgtcattgtttgcttagatttcattttctcttaccaccaatttccacgtcgataacttgaacatcaccagcaacatcaaacttatgaatgatgctttccacagtgtaagtccaaccctcaatgcgaaccaattcaccttctcgcggtacgattgggttacgttgggccacggttgcagtggaataaacaacatcgtagcagtagatatagtgtactaaaacttgcatattagtctcatccatcaataacagtagtgtgtgattgaccatttttgccatatctataagatgttgttgtttgagagtttgggcatctgacaacaacaatatccctgcttatagcatccccattgagtttgtagattttgcagtcttgcatctctggagggaggctgtaagaggcatctttgttttcataagatgggttacagccagccagaaaaattactccaagtgcaaccattgctttcacacaactcttaaccttattgttcacgataatctacctctctgtatgtttttaaatagtgagtgatgagttctggtaattcactacgtttaacgtttgaacgaagaagtgtccagtcaaaacctttaccaaccctcccccagagactgtacattttcttcatagcaactccagaatatcaatacgttcacctttgagtactccagtacggtcttttgcaatcttcccttcaacaataagaatgtgtgcagaccttaaagtgtcactgttaaaggcttttacgaacttgctaggcatcactacaatacacatctcctgaatcaactctggagtatagcagttgtcgtgaagttgctgaataacgtctgcaagtgtcatttttgatgcctccaatactcaatatcaataagttcttgtgcaatgcttttaaggttacctttcaagaaaaccttctcagaacctgaaagagatgaattgtcaattaacctgttcatcctctcaaacaacttctgcttacgattcttgatagtctcttttgaagcacctttcatcatcgctgcatgggttcttccacggtggctcataagccctcctatataagatatagtataaggtactcttccatgagcaccttgtcaacttagttttgcaaactctccgtggagtttaatagcagcttcacagtaagctttatgggcttcttcaggtgtgtcaaacataccaagatgatagtttttaccttgtaaacgtatcattgctcgaaaccttttacttatcttctgtacaccttttggcaacccagatggggactctcttgaccgattgcaagagttttgtgaagctgtacaaacccttaaattcaagtacctattgtcccaaccgtctccattcttatggtcaacctgtaaggttttatcaggtagatatccatccatatacaagataactaaacgatttgcttggtaaccccttccatcaatcagcaactgaactgacttgtgtccatcagtatttgttctgtagtttccagccctcttacctccaaatctagagttaaagtttgcattaccttctctaaacttccaagtaaagacccctgtttcggggtcgtagtccaatagctccttaagacgaatttctgtaatcatttcaacaccatcaatgtacttccaaccagctcttaccaaccttgcctgtgccagttacaagcgtctcactcttcaaacctaaattcttagatgcctgaccatacatccagtcagttatggctttaacttcttgagtcatactttctgggcattcccaactgttttcatcgtggtatgccagcaaaagcctagcaccaattgctggttttcgtccatttaattttgtcaacccttcttcacatgctcttctacaagcaaggttaattgcctcattttgaatctgagcctctgaacccatgagcaaataattcaacagcttatgcggagatttacaccacaaccaagctccagcaacctttacaaaaccccctttagagattgcagcagtcttaccaaacacctcttcaagtgcctttttagttgctttgtagtcagcttccaagtcatctagcagctttttaattttaggcaaacgaataaagtaagtctgtttagtcagcgcaccttcctgagtagttgcagctttaatcgtcttagcaaacttctcatcacctgcaccgaacagcagtgcatagataccattcttagctttcttacgacccttgctaatctcatgaagaagattctcatcctgagtagctcgacaagtcaagatgtcctgctcatcgttcaagttaaagtaaatactgttcagtgtatgtgcatcagtccctgaatagacaacgtacaggtcattctcagagtcatagcgaaggtacttatcaatctctgggttgaggtactcatcaaagtgtttacagtaatagcgtccatcttcttgacgaatgaactcaatttcttctttaccttgcgttaccgctttggtgaagtctttatcacccataaagttacaaagaagaactagctgggctgagttcatgtctacagagacaacgttagtaccttcctcacaaatccacactgccctcattggttccccatagacagcagcaccagacggtacgtttacaataccatactgtgtcatacgtccagttgaagtaccaaacaccattgcaccagcactaaggcgaccatcaggacgaatctggttcaaccaacctttttcatcatcctttgagttctcaatagttctgcgtcggtgcatcaaagtgtagtatttagcaatcttctgtccaagctcaccttcaatcgtatcgtaagatgattcagtaagttttggtgaagtacggattaagcaaggctcaagcaaatctgtgtacttcttcacagaccagttatgctcaatgtactggacgccttcgtgttcaacataactcaaaccacaccgctcaaccatttcctgccacttaggatgctttgtaatcatctttttattgtctttgaaacgacaaactttgacagggcgaccatcagagtctttcttgtagttccagtcatctggaatccaaccaactgatttcaagtagtctttaacaactgctacctgagtcatacgagaaacttcaaactcaattggtgtatatggtgcatcaatcaaacctgtatagcgacttgactcaagttcaaagtggttaacaacatgactgttgtagtacttcacagttttgactgtttttactggcttccagtctttgcatttcttaccaatctttgcattcaactcgttgcaaattgcacgagcatccttcattgctacaaaaccttccttgtactcttcaccagttacagagttggttggtgtatagcaatttctcttttcaatgttaaaaatctttgtagttggcttaccaaatggcttgatttcatatgtctgcatctcaccgttacgtacctgctgacggtactttgtcttagggtacttggtaattctcttcagtccatctgcatgaccaaatgtttcaacatactcattccaagcttttgcaaactcttctccagtgactttacctttggtcttaatagttggaggtagatgcggttcaacctctgaagcaagctcattagtcaacttgtcaagttcctttacatggaactccataagctctttatcagctttccaaccattgatagcttgttgactcatccagaaagatgtttctttagctcgcatgtaggtttcataagtgtctatgccacacttcttaagcttgagatactcattatcaagtgcccgtttagttttggcgttaatacggatatcttctacaacacgagtgaagatttctgcattccacacaccccaatgttcaatctctggtttacgaacaccaacacgagcaccccatgcagccaagccatgagcacctttataaccctttggagttggtctatccatccactgaacacgagactggataagagaatcctgaaagaaattactccacggcttacactttggattatcaaagttccataaatccggtgcaatgtgattgaaaacccaccagtcataacctagaccattatgaatgcaaagacgttttgcctttaacgcaaactcaataccttcacgtaagccacccttaatgtacttggtatacttgtgaccgaggataggttcatctgtaaagacccatacaggaggctcttcatcatcagatttatagtctgcaaaagccattacgtgaactttagtgaactcaaggagtaaaccatcagtttctgtatcaccaaccaaatgtaagtttttaaaatctacgttttccatttttactccctctaaaatcattaacctcatacattactgcaaaaaattataaaaagcaagttgacaatgcacttgacaaggtgttaatctttgcgaagtgggtttttacttaaaaggttacttaacagtttaactatacagatactttaaaagtcttaaaagattatttaatagcttttaaaaagctttaaagtataacgtatagaatacgttaagataaaagattaaaacttaatagttacttaaaagaggcttacatgcagaaaatgtttgttcacccagacatagctgactttgttagagctttgcaaaagttggaagaacttgacattgctgctcaacgggaatatgctcaccatcacaggagaatggttgatatacaacatgaaatagagttgtctgaaaactatgaagatgacttaaaatgctctgtatttgagcatatgaaagatgttgctacagcgagacgtaaagctaaagacacagttgctttactagattctcttaaaaagaggttgcaaagtggtacagacctgtgtaatctagcgtcactgattaacgatgttgaaacttcttgggataggcactattatccacgttctgaaaagacacttgacttttcttcatccgaaaacttaaaatgttctagaaagaaacttaaccaactgagagagaaataatatgaatatcgatgtagaaaagatgcttgaagagaaaggtattgacgaagcatttttaatcaatgccgtagaaagcatggctatgattcttcgtggtaacaactacacagaacagtttatgcctgcaagctataacttgcctgaagacaagtctgataacggtgcttttgcagaacaggttaacatgatgctttgcgacaaaacacttgctttagcatctatcgttgtaggtgttgatgcccttgcagagttcattttttatgagatgcagaaaaatgattatattgccatgaccactgaagaaaaagacttgctactactcgcaggtaacgatgaactaattgacctgttaatttcatcaactagtgctgttatggctgctcttgagaagcgcatggaagaaaaactttcacgatatgaaaaacttgattggggtgtagaagaattaaacccacgaatcaaagaaattatccagcaaactaaagagtctttggaagaagctgttgaaaatgactctgtagctgatatagaacctcttcaggtgaaagttgcactgatgattccagctatctctacgatgatgaatatcgttgcactaatccaactttcacagatgatgggtgtaagtattgagttcattgaagagatgactggtggcgttagtatgcaagcaatcaatgatgttttggtgaacattggtgcttcaatcattgaagagaaactacgcattaacttcggtgatgattttgtgaagcaaatctcagctatggctgaaaaagagtatgctgagcaactgcactaagtctttataaatcttacaagcctccttagttgggggctttttagtaattaatggagataaaatgagtaatattatcgcatttactggaaaggcacgttctggaaaagacacctcatgttctattgtgaagaacatcttagaggatgagcacggctacaatgttgctgtaatggcctttgcagacaaccttaaactgtctgcatcaaagatatttgacctgacttggaatgacctgtatggtgaaactaaagagactccacaggtatttgacttgtcatatcctgaactgatgtttaaagttacggaagctatggagttcaccttcagagatgaacgttaccatatggacttcaagcttatgtcagagttaaccggacgattaatcatggagcttaagaaggttgctaaaccaactctattgacacgtctggggtttagcaaaaagtataaattctcatcaagacaaattcaacagatttggggcactgaagttgtccgtaaagtaatgggagacaagttctggtctaaagaccttgaaaaaagaatggttagattctatgaaagttgctcacttagaaatcaatatggttttgtcttaatcagtgatttaagatttgactctgaagctgagtggctgagtagatttgcacaccaaactattgaagtaaaaagagacaatgtggataagatttcatcacacgtttcagaaaatgggctatccaccaaatatgagcgtgacattattcataataatggtactcttacagaccttgagaacaagctaagagccatcattaaagtttaaaagagagaatgaagatgagagtaaaagacaattttaaagttattgaccaccgtttagtggaactctcatctctttccaatgaggtaatgattgaacgtcttaagagagttgaatcacgaaggaaagagattgcagatgaaattcatgaactggacaagattgaaaatggattgaaggcagaactacaacgaagaggtgctaatgtctaaaggtcgtaaattgaaagaggctggtcagtttgttggtcattgtgcatgtccacgttgtggttcatcagatgctggttcaatctatcatcatgacgatgattcttattcgatgacttgctttagttgtaacaaaggtttcccagagtgggattttgataaaggacaaatcgtgagcacttattctactggttcagacaataaaaaccgtactttccgtgggatggatttagacgatgtaaaagacaaccttgaagcaatggacttaaaggacaggaagattcctgcaaaagttcttgagcgtttgggtatcaaggttgacattgatagtgacggtgaaattgatgcgcatttctacccaacttacaaacgcaatgaagatggcaagctagagcatgttggctaccgtgttcgtcaccgttacccagaagaccatccaaaagagcacctacgcggtaagttaaaagacttttctggtggtgttggagatattaaaggtgaactggcaatgttcggttcatggattgctccagaaggtggtaaccgcctattcatctgggaaggtgagatggaatgtgcgacagcaatctatatgacttctcttgcgattaaggacaagtctcgtcgtaagaattactgtcacgtatctgttccatcaggtgcaaacatcaagtctatcaaagataactatcagtacattacatcatttgatgaaatttacttgtgctttgataacgatgaagcaggtgctaaagccactaaagaggctgctggtatcctacctattgagaaggttcgtttattccagtatccagaaggtgtaaaagaccttaatgaatggtggacaaagttctataaagagaaagatacagttctggaaggatttaagcagcgtatctacaatgcacctcgttactgccctgctggtatcaagaactttgcagacggttttgaggcaatgaagaatcgtggtcagattccattgattccttttccagaatctttcggagacttgaacaggctaacttacggtggttacggtttaggtgagattacgactattgcagcaccatcttcagtaggtaagtcagcttacactcgtgagatgatttattcagcttggaaagaaactgattataatatcggtgtaattcctgtagaagatacctatgaagagttgatggaaatgctctgtgcaatccacctgagcaaacagatttctgagattccttatgatgaacgggattgggatgaattaaagggagcacacgcagagctttcaaaaggtcgtcgcatccatatcgttgaccatcaaggggcgattgaccaagataacctgctggagtttgttgactatcttgttaacagtttagactgtaagattattattcttgaccctattacattggctctgtcacgttctgatacggatgaagaggaagtcttgtctgaactattgcgtcgttgcaaacgctaccagtatgcacaggtaaacgtttgtcacgttcgtaagagtgcaggtggtcagaaagctaactctgaaggtggagatatctctgaagaggatattaagggttctggtgcgtatttccagatttccatgaacaacattctgttaatgcgtaacaaggttgacccagaccctgttaagaaaaacttgacaaaaatcaagttaactaagtgtcgtcgtcatggtaagtcaacaggtattgctggtcatacttggtacaatccagacacaggacgtcttatcaaagcttctggatgtggtgttgacattgatggtgcagcagaaaatattcgtcaacagtttggtattggtgaagctgaagaccattatgacgactctttacctcattatgaggatgaagtgtttgaccgtgagactggtgaagtctatactgaagaacagcgtcaaagctcaacgattccacctgtattaagtgaggatgcagatgactgcccgtttgaaactgagtgatagttacaaaagagaggggttcatacccttctttgaagaaaaaagtttaaatgaatttcaggaagagtgtttgacaaaggttgataggttctatagaatgctctacatgaaatgtgatggaggcgttgaggtagaagaaaagttccatcacagtatgataacagtcactattactatacctcgacataatattggttggctgtttataattaaagaaaatgtgtttgaatatcaagtatatcggagaatatcatgaaacactctaaagcatttgaacaagtttttggggattccttaaaagccactgctggtaaaccagcaaaatactatgaagagaagcgtgtaagaactggaaaaactgcacgtaaagcagcttctaaagataagcacaacttccagtaattaatgtttgacaatagagtatcaacaaattagaattggtactcttcataaattgagatagaggtttaaataatgtctaaagttgttaaaatgaaagctccggtagagaagtacaatggtactgaacgtcaaactctgcgttaccttctgaaagatgtttggttttattacctgaacacttcaccacgtccgggaaaaggtaaatccattgataagaaattcccaggcaaagactgcaactacagtgtttcaattctggcagaagatggtaacaagctgtttaaagagtttactaagtctaagaaaaacccagaaggttgggataaagttactactgaagcagttgatgcagatgacttcgaagagaagtttggttgtaaaccaccttttgaagcagacacttactacatcttgaaagtaagtcgtgcagcagcttataaagatggtgctgtatggacagctaaacagtcattccctgtaatgctgattgaagaagtaaatggtaagcgtgtagctgttaaacagccgatgaagaaaatcaaagctcaagcatccgataagcatgaagatgacaagaactatgatgtaattcatccagatattgcagttggtaacggttcttttggtagtgtgattctttctactcacttctacacttttgagaacaatgttctgacaaaacctattcaggaacagtttatcattgatactcttgtaccttacactggtggtaacggtgctaacggtgaacctgaactggatgaagacgaactggctatgcttggtcttgatggtgttgaagataatggtgaaatcactgaagaagacgcaacagaccacaaaccttcgaacaattctgatgatggtgacgatgaagacttgccagacccagatgacgaagaagatgaagacttcgatacagaagactaatctctaaaagttactttaaagccctgtacttagtatggggctttttcatatggagagtcacaatggagaagtatacactaacaaaacttcccgattcagttacacatgtctttattgactctgatagcattgcctataaaggtgcttgtgtagttgagaaagcaaaatataaatatgtcaataaactcacagcagaagaatctgaaccatttgataatgcaaaagatgctgcaagatggttagcagaccagagaatccttgtggaagagcttggcctgacatttgatgaagatgaatgggaaagacagacttggaaagaagctaagagtgaaaaagaagctatcatggctactcagcaggttcttcaggaatggcttaaggttgttggtaaagaaagaacttgggtaggctacttaacagagaagggtgtacataaacataaagacattaaaggtcttgagcaccaatatcaaggtaaccgtaaagatgctgtcacaccaacacacttagttgcttgtcgtgaatatcttctgtcaagaccagagttcaagctcttaaagggaggcttcgaagccgattccatcgtaattgctaaagctgaaaagatgggtaagaaggctgctcttatgagtattgacaaagaccttcgacaagctgaagggacttattgtattgatatgacttatgaaaagtcaccactaatttttattgctgataataatgttggtgatatctgggattgtcctatcaaatcaaaaccaaaagctgcaaaaacagttggtgtaggttttaaatttttgtgttatcaggctgttgctggagataatgcagacaactacttcggccttaaaggtgctggcaaagtagctgtgatgaatgctttagatggtaaagagacctataaagagtgtcttgatgctatctatgaactctatgctaaaaaagagtcttacacctatgtgtcatgggatggacagactgttaccaaaacaccattagagttaatggaacaacatttctgggtagcatatcaagagagaaatccaaaagataatttctcttttaagaaatataattgggagccgtgtatgaatgaagattaaaggatttggcaattgccccacctatggtcattgggtatctttgtgtggggaagttgaccccactaaacattttggctttgtctatttagtatactgtaagaaaaccggacaatattatatcggaaagaaacagcttaatagtgtgaccaaaagaaaagttgctggcaagactcggaagaaggtagtcactaaggaaagtgattggatgacttatgagacttcttctgagtatattaaaaaagatattgagagctttggaaaagaattttttgacttttatattattcaaacctaccacacaaaaggtggtctagtttatggtgaagcaaaccttcaacataaattcgatgtaatgacaaaaaggattgactctaagctcagactcttctacaatgccaatattgcagcaattaagtttattactaaagaaacttatgaagatgctgaaaaaagaatccataaggtaatgaaagcaaactgtgcttgataactattgagagagaataaaatgtttaacaaaagtaaagctgtgagtcatgtagcaaaagttgatagcaagattgaagaacttgagcgcattcttgcaaatgccagagagtcaataattaaagaggttgaagctgttgaatctcaaatgcagcacctaatgcttaaacgtcaagagctacgtgagcatctggaatatattgaaacacgagagctaaaggttaacagatattttaaggagtcagaatgtttaactcaagagaatcagtaaaaaactggaatcttcgttgtggaaacactcaaaagcaaccctacagcaatgagtattgggaatctttgaaatctcaatctctatgtatgcttgaagaagcaaaagagcttgtaaaagcaattgaagagaaagaccccattgagacactggatgctcaggcagatttgcaatatgttcttgacggtttgatttacctgtcacaacatgaccataatggtgctatggaagctgtttgccataacaatgacctaaaatacacagacaactatgaagaagctttaaaacgtcttgcagatattgagaagcgtactggtcaagagtgtatcatcagaatgtcagtagttgatggcaaagaatggtatgcaattgttcgtgcagccgatgggaagattatgaagcaatctaatctccctaaagttcagcttggtgaatacattgtagaacttgaaagccaagaactttttgtggtagtatctgagacatgcgttatctgcaaaggtattgtatgtagcttaaaggatttgggtgtagatggttttgtagaagttaatccaattacctctaaagcagataaagatttctgtaaagagaatggactatggattgcagatattgtctactatgatggtgagcagttccatgtaacctcatacccaaaactgaattatgatgctaataacctgaagtgctggttaaaaggggttggttataatggattcacagaacattaataaagaaggtgtggctcagaagagccacttctcaaactacaatatctctatgacggtgtttatgaatgacccgttacttgagaagtatggtgagactccagatacacttctggataatgaacaagttttaaaagcagttctgtacaaatacgggattgatattgagaaagagtattcttttgaaatctgtcaacacaggaatacttttggtaaagttgtaatggctccactcttcatgggtgtagaaagaactgactatggttggttatatctaaaaagaaacttggagaaataccgtgtctaaagcaaaaaagctatcttatgatgacattatctcaggtgctaaattaggtgttgatagtatcggacaagatgttaagcacggggacacagtcatgtactgtgacgacagaagaggcagaagtgcaatcttgtttggaagagttgtgtgcaagatgcgaggtaattacgttgttgaagacatgaatgtggatgtcacaaaacagcttgaaataattatgaatagtgatatatcatggttcgtgaattgtatgcacacctcttcagtcacaaaggtaagtgataagttttacgatatgtggcagaatgagcaaattttcaagatttaaactagggagcctcttcggaggctcttttcatctgtaggattcaaaaatgattaagacaattaaaaaatcaaacggtacagtagtaagctttgacccagaaagactgaataagtgggcatcatgggcagataagcgtggaatcatctggtcagaagtcactatggaagccatgaaacgtgtctatggaggttgcactacaaaagagatgcaccaagctatgattgatgtttgtgttgataaacaaactcaagagtactcagacatggctggacggctacttctaggaattatctacaaagaagcctttggaggctttactaaggttcctacgctggttaccttcgttaaaaatatggagagagcaggactttgggagaagatggattactcacaggaagagcttgaatacctgcaaggttacatcgtgcactcaaaagatatctcttacggttatgcagtcttgaaacagttcagagacaagtatggtatccgtgatattaaaacgggaagactttttgagtcaccacaatttatgtttatgggtatggctatgaaagcctttgagaagcaaccaaagcaccgtagactgcaagatgttatcaagctgtacacttacctatctgacctgaagattaacgctcctacgccttatttaaacggtttgagggcaactaaatcaggttatgcgtcatgctgcttgattaaggcaaacgatactgctgaatcacttggtattgctgcaaaggttgcttatgatatgactacaaagcaagctggtatcggtatgctgatggagactcgcactattggtgatggtatccgtcaaaacactatcgaacacatgggtaaactgccttattacaagcttgtacgttcatctgtagaggcaaacaaacagaagagtcgtggtggttcagctaataacttctacactgctctagacccgcagattgaagatttactgcgtttgaagcaccctacaacggttccttctaaacgtattaatgagatggactactcattcggcacaaacgattatttctggcagtgtgttcagtatgatacagattggttgctattctcttacaaagatgcaccaaaactctatgacatgttctacacagcatctgctgatgagtttgctatggcagttggtcacgcagtacattcaggagttaagcacagacgagtcaaggctcgtgaaattgctaagctgtttattcaacagcgttatgctacaggtcgtgtgtatccattcttcactaacaacgcaaacacacatacaccatttaaagaaccattgaagatgtcaaatctttgtatggaaattgtgttgccagtgtatggttttgagaaagagacagacctttacagagacgatgctgtgaaagaggatggtgaggtggctctttgcttcctagctagtttggttgcagggagaatttcagaagatgaatacgctgacgttgcttattatgctcttgcaatggttgactccgttattgaccttatggattatccgtatccatcgatgcgcaaccatgttcagaagcgtcgttctgttgggattggccttacaaatgtggctcattaccttgcgaagaactacgtgaactactcttcacgagcaggtaaaacgaaacttcatgaactggcagagatgcactcttactatctgcatgaagcctctctgagacttgctaaagagcgtggcgttccagagtacatgaagttcactaagtatcctgaaggctgggttcctccaaagacagctaacaagaagattgatgaaaagcatgatgcaaaactacgatatgattgggatgacttagcacaacgtatcaaagaaaatggtggaatccgaaactctgtattagaagcttacatgcctaatgagagttcttcactggcaactaatacgacaaatggcttgtacccaattcgtgactttattttaactaaaaagtctgcaactggtaacgtgctgtttattgttccagattatgaagagttgaagtatgtatatgaaattgcttggggtattgacacctttgacctgattgattgttatgcaattgttcaaaagttcactggtcaagctatctcttcagatttctatgttgactacgcaaaagctaagaaggtatcattggctcaagctttgaagtacatgatttatgccaactcggtaggtatgaaaaccatgtactaccttaacagtcgcattggtgtaggtaaatctgcactgcaagatgcttattgcgagggttgtggtgtttagttttaataactatgagggtcgtagaagaccctctaaaaataactttggagagaccatgaaagatttaatagaaaaacatgagcgaccaatatacttgctctacaaaccccgcaaaacattgtactatgtgagcagcacaggtatcatgataaagcagaatgatgacttatgggtcactggagcctcttacatctctacagcagatggtaaaatctacgcaagaccttatgagatgtttaacaaagagaattgggaagttttagacagaaaacaagccttagaaatgataaagaaaggagaaatcacgctatgattaaccagcacccaatctttttaggtggtgagagaaaaacttttgactcactcaataagcactacccaaaaatctttgaactttataaacaacaaaaagcacaagactggtcagaagatgagttcccttttgaacaatcacgtcttgattttgagagtgtcccagcatcaatgtcaggtgtaatgcttgagattcttaagtggcagtgggaagcagacactcaagttgctaagagcttggcatttgcctttgcaccctttatctctgatgacatctatgcaactgcaattatgaagcagtctgagattgaaaacctacatgctcttacttactcagagattgtaagacaatgtattaaaaaccctgaaacaatcttagatgagattaaccagaatgttgctgtacaagaccgattaaaaactgtgaatcgtgttcttgaagaattactggatgaaggtataaactatcgtctgagttatgtgcgtgactcacttctggacaaagaccctttacacttccataaagtgattctaaaagggttgtttgcagtgactgcgcttgaaggtatatcttttatggcatcctttgcatgtacttttgcacttgatgctcaagataaatttcagggtattgctcaagctgtccagaaaattatgcttgacgaaatccttcacactaaaattgatattgaagttttaaaagaaactttaagagatgatgagtggcagaaagcttttcaacaaattcttccagagattaaagtaatcttagatgaagtagttgaaagtgaagagaaatggtcgtattatatcttctccgaaggacgtgctgtagttggcttaaatacaaagcttcttcatgagtgggtttactataatgctgccccactgtatgatatgtttggcattcccagagattttgtagctcctaaagaaccacctttgaagtatatgattaagaagatggaaattgataaagagcagaatgctaatcaggagcaacagaacggtgcgtacctattgaatactgttgtagatgatttgaatagtggatttttagaggttccttaatgacttatgtaatttactccaaaactggatgccctcagtgtgagactgcaaagaattttgcaaaagctcgtggtattgaccatgttgtgagaatgttagggcaggactatgaactatcagacctgatggagattgcacagatgccagttcgtcagatgccattcatcatgaaaactgatggacaaaacctaaaacctgttgggacgctacagaattttatggcagaggtgaataatgcttaaacgcatttgggaaggtttggttgttgatgcaccagcgattgtgattggtatgttgattgttaacctatttactgactttgaacaaggttcattgtttggagccatgttactatgggttatcttcgaaatattagagatacaattaggtatcactgaaaaactaagagaactctttgcgaagttttctaaaaagatttaaaatgaaagggtctcttcggagacctttttagcatgtaaaggggcaataatgaacaaagtacagattattaaaaagaatggctcactcgaagaacctgatatcaaaaaagttttagcagcagtcacaaagtcagctaacagggttggatataaagaactgccaccagatgttacccaagctcttgagtcagcatttatgaggattctggtaaagtccactaaacagaataatttactaatttcggtaaatgatattcacagtattgttgagggtgctttggcagaagtcaatcacgaaatctatgagtcttactcaacatatagaaattaccgtaaagaagttgctcaaaattgggatgagctttaccagaagaccaaagatacactcttcttaggtgacagagagaatgctaactttgacagtagtttaatctctacaaaaggttcaattattcgtggttatctgactaaagaaatctttaaacagtaccatttaacaccggaggaacttgaagccattgaaaaagggtttatctatatccatgatttaagagacctaatttttggtggtatcaactgttgcctgttcgacattggtaaagtcctgaaaggtggttttgaaatgtctggcatcgaatattgtgaaccaaagtctgtactgtcagccttacaggttattggtgatgtagttctttcagcaactgcacagcaatttggtggctttactttagcagagattgataaggtacttgtaccgtatgctaagaagtctctacgttaccatgctgaaaaagcagcatcttacggtattcctaaagaacattaccacaattatgtcatggagcagctacagattgaattaactcaaggttttcagtctcttgaaatgaagctcaatactgtaccttgtagccgtggggattttgcattcacaactttgacattcgggttacttgactcagatatgtctaatgaagataaccgactgcaatacatgattgcaagtactatcctagatgttcgtatgaatggacaaggtaagagcaagaagcctgttgtattccctaaactggtttatatttatgaccagaaaagacataatgagaatatctgtcaaggccacctgtacagtaaagctattgagtgttgctctaaagcgatgtatccagatttcttaagtgtatctggtcatggtgctgtagcagaagcttttgagcgttctggcaaggtaatttcgccgatgggttgtagagccttcttatctccatatcttaatgaggatggggaagagttctacgttggtcgtgctaacattggtgctgtatctttgaacttaccaatgatttaccagtattctaaagagaatggtttagatttctggaaagagcttgataagtacctagaaatgattcgcagcttccacaagaaacgttacgaaatgattgctaatatgccagcaagttctaaccctcttgcatttacacaaggtggtttgtataaaggaactaagaagcctactgacagggttggttgggatattgtgaagtccttcacagcttcttttggggttactgcgcttgatgaactatctgttcttgctgaaggtaaacgacttcatgaagttggaagctgtagttttgcatacgatgttctggaatacatcaacatgaaaactgaagagtttaaaaatgaagatggtttcttatatgcagtctatggcactccagcagaatcactttgtggaactcagctaaaacagttcagagagatgtttggcgttagcaaaggtgtttctgataaggaatactttacaaatagtttccatatgaatgttgcagcagacatcacaccatttgagaagcaggacttagaagaacctttcttccatatctgtagaggtggaagaatccagtatgtaagggtagctaatccagagaacttatcagcacttaagagttgtattacaagagggatgttgaaaggtttctatcagggacttaactttgacttagcaatctgtgaacattgtggtaacagaccaaaggctgatgttgaagaatgtgaggtttgccattcacatgatatctctgtgattaacagggtgtgcgggtatcttggatggactaagattaaaggtgaatcccgaatgaacgatgcaaaaatcgctgagattcgtgacaggatttctatgtaaaacttgacatgaaaataatacaatcaaatatccattttaatggtaataaagcgggaggcaataacccaaaggaaattatcgtgcatcattcggagcatagtaccgctaacgtgtacgatatcgacaggtggcataaggacaagggttggtgtggaattggatatcactattttatagataaacaaggtaacatctacacaggaagacccgaagactggacgggagcacattgtatagaccataacacaaaatcaataggaatatgtttacaaggtagattacaggttgaaagtgtaacagacgcacaatataatgctttactatggttaataaaagatattagaaatagaagaggtaatatgcctatctatggacacaaagaattaaactctactgattgccctggaaacttagatttaaacaaattaagaacagatgtaaacaacaaagttgttgacagtaacggcggatatacagagaacgcaacggttgttaacgttaattcatatttaaatgttagaagtaaaccgtcagacgaaataattggtaaactatttccaaacgaaagaatacaggttaactgggttgatagtaattatttaggttggtattatataacatatagagttaacgaaaccaataagctaaagagtggttatgtgtccgcaaaatatattaaaaaagactaaaaggtgatgtgggtcttgataggcttacatcacctttttttttttattggatgttagatatggcagatagtattattgggttattcataggttctgtcttactagggttctttttaggactttcttattgtgaattgagagataagttaaaatgtttaagatatcaaaaacgatgatatacatactccacattctagtcttcttctttggggttagtgttatggtatggggtttttcagacccacaatggagtttctcatatcatggtcagatggatttatggtcatgcttcaaaccatttttagggttagctatagcattcagtgcattaccaactaaggtgaaattatgattaagttgagccaaaaacagttagagtggattaaggattacgcctcagagtgtggctcttgtgaaaagaatcacgtaaggtactcaacattccacacggtcttcacattgtatgttggcgacaacgttctaagtgattccgtagtggatggtgtaccgttacctaatgagttacttgacaaattagctgtagttactggaacgtggagtgaagaagatggtcacgacctatctaacgatgttgtcttctacagtcttgaaaatattatgaatccagagtacattatgctaatgacttgtgcacaagactgtgttccattacaaaacttcattaaagagcactgtgaagagtttattactaaacaggttccttgtcaggtagtgtttgaatgagtaaaacaattaaatagtattggtgaggtaactagatgaattacatggagattcgaccatttgacacagctaatggtgaaggggttcgggtaagcctcttcgtagctggctgtaaacatcactgtgaaggctgctttaacagggagtcttggaagtttaatgctggtaaagagtttacttatgcaaacctctacggcatcattaagttaatggatgataaggccattagtggactgtcaatacttggtggggagcctctggatgatagaaacattcaagaggtcaccaacatatgcaagcgtattaaaactgtttatccagaaaagtctatatggctttggacaggttttcaactgcacgaaaaaatccacttagatgtgatgaaatatgttgacgtggtgattgatggtaagtatgattcatctaaaccaacagttaaaccatatcgtggttctgataaccaaaacctctggagaaaagagtatgggtggcaaggtgattgtcagtggagagccgagtaagtctcgtcgtaaagtaggttatcggtaaaggccactttacaatgtgctacagaacaaacttaaccgttggtgtcactgaagaagaacttaaagcattttgtgaaaagattgagagagatacgaaatgggaatctggaacagttttaaatcaaaagtaaaagcagcactggcatcactaggtatgctcactggtgttgatgtgactcatctcatgcagcacttcaagatggatgagaaactagctaatgagattatgaaaagtatctatgtaggccgtggtaaaggtggtaagaaacaagcacatcgaccaactggtgcagcagctattaaacgggcagctaagaaagctcgtaaccgtaaacgtaataagaaggctaaataatcatgagcaaagtttataacactcgtaaattacagattttcgtactgtgccagtttatggctaaagagtataactgctactactgtggcacagggttcatcagtgacaatgacggctcatatctaccgttcaaagaggctgtaaaactcttcaatgaagaagtaagctctaagaaagatatcgaaaaggttaagctaacctacagtaagaaagataagaagattatctgcctagataactttgtaaaagttactggagaagcaaaagagtttatggatgagagtgagatttcattcacaagcatcttgaaagtagctcagtaaacagatactataagggaactgcaaaggttccctttttatttttggagataacatgtatctgtcaaatctgaaacgttcggctgcaatgtcagttctaagactcagctttgaggaacgtcaagagttcattgactcccaccaatacgacccttctaactctaaccgcatgattctctggaatcgtgatagtactcgtgaaagggcactattccgctattacccacattacaccatagataacctgtatgaatgttttgttgtgaagaacactatcacaattctcaacaaactttgcagatacacaggtaatcaatccttcacattaggtcaccacaagcctgttacaaaaggtggtgaacatcactgtgcaaactggtttatccagactaaacttgataaccagaagcaaggcgatagtcttttaagcacccctaagatgacctatgaagagcaagagaaatatatcaaaaataatatgccagatgtgcttgacaacagctatacagatttggcaatatctctcctgttgaagttcgagacagtttatagggcaacttacgatggctagaacagattgggaagtaaaagaacttgtaagtgatgctggaaatggctgtgaggtgtatatgattcgtggccatgtgccagacccattagctattgagatgattgaccatcacacaagtggattctacaaagaactcggtgaaccaagtgttgaaagaacttggacaaaaccagtaccagatagcacaggtaactgttcagtaatctatcacattgtgaatccacaaaaatgcaaaacagctatggctgtgacattcgtaacttttgattgagagagaaaattatgaaaactattattgaagccgttgtcaccgcacaagagaaattcttccacacagaaaaatttaatatcatccaatttccatctggagaaattggtggaaacttctctgaagactttgttaagtttactgagcgtaatgctggtaagattgacaatgttatattgactgtgcagggatatgataaagatacactgtttgcattagctttggctaaggatgccgttgacagtcttgttccatacaaatcagcgatgaaaaccgttgttttcgggttcttaccaaatgctcgatatgaccgccatatgttcaaaggtgattcagcagcactgaaagcttttgccaacctcgttaatgcaatgggctttgatgcagtgtgtgctcttgaccctcacagtaatgttgcagaaaatttatttaagtgctttcagagcatgaagcaaaaagatgtagcagcacactttgcaagtgacccacgcattgatttcttggtagccccagatgcaggtgcagctaagaagactgaagagactgctaaagaggtagataagccatatattacaatgtctaaagtacgcaaccttaagactggtgaaattactggtatgcgaatccttgatactgttgatttgaccgataaaactgtcatgattcttgatgatatttgtgatggaggccgaaccttcatagaagcagctaaacatcttcgtgaagcaggtgcaaaacgtgtggaactctatgtaactcatggcattttctctaaaggtgttgaaaacttacttgacaatggtgttgaccatatctacactacaaactctttaggggaagctaaagaccgtggcttaacacattatacccaagttactgtagtaaccattgattgaaactttataggggcttcaaagccccattttgagagagattaaaagatgactaaatcactttatgcagtaccagcaggtttaaacgcagatgcttacaaatctggtcacatttaccagtaccctagtgcaacagaatacttgatgttcaatctgacaccacgtagtgataagtggttcaacagccccttagcaattgatggtgtagtcgcttttggtattcaacgttttgttaaagattacctgatagaccactggaacgccaccttcttcgaacgtgacaaaaaagaagcaattgacgaaatcttagaagttatgaacggtgttctgggtaaagatgctattggtcgagaacattgggaagcactccacgacttaggttatctaccagttgaagtctacgctgtagaagaaggcacagttgttcctatgcgtgtaccaatgattgtcttccagaacactgtttcaggtttccattgggtagcgggatatctggaagatgctttctctgctgagatttggaaggcttgtaccattgcaactattgcattgcactacaaacgtatctgtaagaagtggtctgaccttacttgtgacaacgacttacatttgccttatcagtgccatgactttgctatgcgtggtatgtccggctttactgatgacgcatttaacgctgtaggtcacttaacaagctttaaagggactgatagcttccctgcggtatatacagctaaacgcatctatggacagtcctatccaatctctgatattggtagctctgtaccagccactgaacactctgtaatgtgtgcaaacattgcttgggaaggtggtaatgagttgattgaagaagaaagacgcttcaaaggtgagttacaaaccttccgtcgcttcttaacagaaacttacccaactggtattgcaagtgttgtttcagacacttataatttctggagaactgtatcagtaatactaccagaactccgtaaagagattatggaacgtgatggcaaactggtaattcgtcctgactctggagaccctgtacatattgtcacaggatataaagcaattcacttagagtgtgctaaaaaggcttattacgaacacctaagcaagcagaatgccagtgacacaatgttgagcaccgtcctgaacatgaagcttgaagatattaactatgttatggctgggtggttacgtgcagaaggctatgaaatggtggttgacagagaagactttgaagtagccgatacagtgttgctgaaagatgcttacatcaacggctctgcaaacgttgtaacacgtcctgtagcggagattgatggagctattaagacactgtacaacatctttgggggaactattaactctaaagggtttaaggtactggatgagcacatcggccttatctatggtgactctatcacgctggaacgtgcaaacgaaatcctgaagcgtctgtatgaaatgggttttgcaagctctaacgtagtgtttggtgtaggctcttacacttaccagtacatgactcgtgatacctttgcatttgctgtcaaagcaactcttgcaagcattggtggtaaagagattatgcttgcaaaagaccctaaaacagatagtggtgttaagaaatctgcttttggtggtgtagcacccatgtgggatggcgaaaagctgaaagctgtagatggctatgggttccagagctttgcagatgtacttgaccacccagcttgtgctttacgtctagtctttagtgactctgagcagttcggctacacaactcttggtgatattcgaagtaatattgacaagcagctttaaaagtatatgataagaggctcctacgggagcctttttaatttctggagaatattatgaaaatcaaagagatgaacatcaacattgtcttagaagaacgttgggagaacatcaagaagcctgaagatggtcataagttccttaacaaaatcttagtagcagctaaagaggaactgactggtaagattgcagcagcaatcacaataaaggtttgtgtaaaaggtcttccagacaaccaccaatttgcacttgacgagtttaaagaaagcttctacaatccaaacaaacagatgcttgaaagtaactttgcagtgtctacaagtatcgtccatgacagaagctttatcctttacaagaatatgagaggtgagtcatgcaagcatattggatagaaattttactgtcacttggcagtgtagcagtctttgtttaccttctttgcaagtactatgcagagcacaagaagtgtgattactgcaatggggaagggtatacaagagcaggttgttgccctatgtgtggcggttctggtaaaatgtttaataagtaattcaacagtaaactaagaggaaagtattatgcgcatggtaaacgaccacgcagaagtgattaagagttcaacttctttggagacatctcaagcacagattacaatgacacctgaaatgttcagccttctgagttctggtgtatacacatttaaagaaagggcagtgattcgtgaactgtcatgtaacgcagtagatgctcagaaagaagctggaagagagaacatcccgttccatgtgcatttacctactcgttttgagccttactttgaagttcgtgattttggaactggattgactcatgataaagttatgagtttgtacctaaactacggggcttctacgaagaatgactctaatgattacattggtgcaatgggtatcggctcaaaatctccatttgcaattgctcagtcattcacagtatctagctatgttgacggtgttgttaataagtactctgtttatcttgagaatggtatccctcaagtaactaagctgacaactaacccaacaaaagaacctaatggtttagctgtacgtgtggcagttgctgaccaccgtatctcaaagttctttgaagaagctggtaatgtatactcatactttgctgtaaaaccagaaagtaatattgtgtacgacgatgtattagcagatatgaacgtcattgcccgtgaagagggtgtttatgatgccatgattcataagcaaagttggcgttctagtggtaacaggacagagtttaatgtggtgatgggtaacattgcctaccctgttaacatggaagcattacttggtgatgacttcttcaaagtattgccagaatttttccgtaggagcgtagaccttgtaaacatctacatgcctattggttcagttgctattgcagcttctcgtgaagcattgcagatgaatgacacgacaaaaaatgttatcattgaggctactaaaaagataactgaagccattacaaaggatgttatcaagaaagttaatagccaacctacactcatggatgctgcacaggcttatgctgagttacgtttgaactcacgagagatgtttaatgctgtgtgtccaaagctagagtggggaggcgttaagcttgattctctggaagaagaattgctaaacattcgtcgtgggattatctacgcagaagacggctcagtcatttatgaacgtgatggtaaaggtaatattaaggttgacagtaaaggaaacaacattcctaaagtggactacctatacaatccagttgcttatgtcaagttcaactctttagagagtaagattcgtgcaacagcactttcctacactcaagaggcaagtatgttcaatatctttggtgcaatgcgtaaaagccaaattgaacagtttttgttcgtgattaatgaccgtcgcaataaaaacggtactgagaagactgtaggacgcaatcaaattttgcgtggtgcatgtcgagactacgccagtgagtcaaatctgtttcacagatacaatggtattgtctttgtattctcgactgaaaaagagttagatgatttaatcaatctacacaaacttgataaaagcttgttaaagattgtgaagatgtctgataaggaacaccactatcagcgtaaagaagctgtaaggggtgttgtaaaactctggaaagctgttccagcagaaactaaagcttcatacaaagaggtgtcagaagacttagacacaattgaagagcctcagctttatattaaggcagtaggtgacacagttgatggtagatgtttttgctcatctccagaggatgtagctaagtcagttgctaatgttacaggcaagacagtctatgttttccgaaaagcaaattggaaaaagataccagaagactggattgaagtagatgagaagctcttgaacgacagcttaactgatgttcattggattaaccataacaggtatatgacacgcatctacatggatggtgtcctcgaccttacaagcagttggattattgccagaaactttacgttcaataacaggaagatttctcgcgggtattgttattcaagggatactattaagacaatcttcttagaagggaatgaagatgctgttgaggcaatgttcggtaagattcagtatgtggctgcaccgtttgcatacacttacactatcagtgttcttcaggatttgaagtcatgccttgataatgacacaaaactgtacaaaaagattaaaaaagcaggtgaccgcatggttatcaagctgacaaactatctttcaaaaagaaaacaagaaaacttcttgctttcacacttagattggaataaagtatcacctatcgaagtgagtaagtttttaggctttaatgtgaaatgtgttccagaaggtacaacaatttacgattaaagtgtttgacaaggggctttgaagccccttagaatagcctcacaaattgattgattaactaacaagagagagtaataagatgactactaaaactaaagcacagattgacgcagaaatttacaaactggttaaagaaggtaagctgactaaaacagctattgcacagaagttcaatacttcaacccgttcagttggtcgtgctgtagagcgtcatgaagcaaccttaaaaggcaagaagaaggcaacttctacaccagctacgaagactttgaaacaagttgctaagacttttaaaaagaaagctggcaaaccagttgaaaaggtcgttaaagacactgtacagaaagctccagtaaataaactgcacgaagctatgcagaaagatgacaagattgagtacatgattactggtgattctgtaattatgacttatggttcagaatctgaaattgttgagtctactcatccgaactatcaagagattgtagttcatgttgtgaaaggtgagttcaagaaagcatttgaactgatgaacattcgtaagtctatcgaaaacttcactcagggtgctatcacaatcaaaggcgacaagctattctacggtgctgttgagatgcgttctactctggttgaccgtattcttcacatgatgaaaactggcgataaaggttttgaacgacttgtaatgttcttcgaaaaactgatggaaaacccatctaaagattctgtagaacaactttggggatttgtatctcaccttgatgttgaaattgatgaagaaggctacatcattggttggaagaaagtctctactcgtgaaggcaagctggttgactctcacacctacaaagtgcctaatgatttgggtaacattgtagaaatgccacgttggatggttgataataaccgtaacgtaacttgctctcaaggtcttcatgttggtgcttgggattatgttcgttgcttctcaggtgatacaatcctgaaggttcgcgtacatccacgagatgttgtatctgttccaactgattacaatgatatgaagatgcgttcctctcgttatgaagttgcagcaatcgttgataatcaacgtaaagtgctggaagcatgggacggtaagactgaagctttgcatgtcatcgttggcactgctggtgaactcatctctcaacgtaaacgtgaaatctaataagtaatttcttaaaaggctgcttcggcggccttttttatttgtattttgtgcagagtgctgtataattgatgtcacgataaactaaacaggagaaccaatgaagaaattgattctaggtttgtgcttaatgtttacagcacacttatcttatgcagttgactgcccagagctatcaattagtcaaaaagtaaacatgttaaaagcttaccagtatggtgagaataatatggggaaaggctggggtattactctagcagctatagccttacaagagtcagagttaggtctgaaggtagagaataaaaagacccacgactatggtattttccagaatcacttgaagactgttgtaaagcgtaacaaaattagtcctaatgtggctaaaaagaaactcttaaaagactttgactatgcagcaagagagacacataaagagcttgagttttggactaaggtacatggtcacccaaagtcaaagaagactttacaaaaagttttagcatcatataatgctgggtattcgtacaaaatccctaaagctaagaaatactctcaagatgtctataacaatatgaaagttatcgctcaatgtgaatttgcaacaaacatttctaaggtaaatcatgaaaaaattaagaaagtctgatgaagtcctgtgccatgcttacgacttgcaccctcatgagttaggtcttgattcctgtgtatggactccagaacagtgcagggattttgaagatactgcaagagaagttgtatgttcacttgaagagttccacacatcagaaccaattgtgagcgttgtggacaaagagactggacaaactgtaggtgtaaggcgtgacagcttagtcatagtcaataaagaccttgtagaaaaaggtaaccttatcttagcagatattgatggtgttcttacaaattttaatcacgaagattgctcaacggaattgactgatgggtcattctcacagtacactaatcttcttgactctgtaagagcaaaaccaacatatgtttttagtattattgatgcaattgctaatcatgctgccattggactcttgacagcgagaggtgaatctcagagaatacctactgagatgtttttaaggcataacatagagcatgattacatgctttttatgcgtggttttggaactaactctataagtgcagaaagtttaaaagtgaggatgattcagtcttgcattcttccttattttaatatagtatgctttatagaagatacagagaagaatgttcagaaggtaaacagaatccttccacacattaaaaccatgttagttaaacattgagagaaaaacttatgaacaatatcattacggtagcactggacgatacggcaaacaaatctgaagtagttcgtaaaatgattcaaggtaactttgaaggtaaaattttccgtgctgttaatgtaaaagctgatggcagtattcgtgaataccgtgcattgttgaatgttaaaaagcacgtaaaaggtgctggttcaacgactgcacacaaagaaaacctgatgactatctatgatatgggtaaggcttcagagttaggtgctgaaggtatcgttaaagaaggtgctccgtatcgctctttcaatctggaaactactcttatgctttcctttacgagtggttctaaaacaatcacttatctctttactgatgctgcaacggtatctgctattaaggatagcactgtcaaagctggcgtagttgctgctgcaaaagcttcttcgatggctgcgaatatccttgctaaagtcctcggttaaggttaagatacaggctccttcgggagcctttttcatttcaggagattgttaaatgacatttaaagagttctgtcaagctactttcataattgttttcttagttggtgcaggtgtctggggaggatactcttacagagactatcaagttgctgaaactgagctaaataatgagaaactaataagtgttgctaaagatgcttatcaggaaggtttagccacactcagcaccaattacaaaaatgatttgaaagatgtgcttgctaagaataagcatacaaaagaggtactaacatatgaaaaaactaagccagagttttataatgtttgtgctactgataactatgtcagggtgttcaacgaacaaagtgaacagtacattcaaaaactcccaagtaagtgagagtgataagtacactcaagaagaatcacggtatatcatcaaaggcaacacaggcagtgatgtagcagcagcccttgagttctatcgtgacggcttttaccagtgcacaatcaaagctaacaaccttattgacatgattttattagggaataagcagcaatgacagagaatcaagatactttctatgtagaaggttacttactgttgccacgaccaaaagaaacttatatgcgaattgatttcttaccaaccattatggataatgtgatgtgccatatctttatgcaaggtgtcacagcacagcttaagcatgttggtaaagagtgcaaaataaaggttgacactcatccagaaatcaaagagaatcactacacatggttcttaccagactctaaagaaatcttagcagttcttaaaacgaggaagtaactatgcagattaatggaagagactttgtagccgtttactacgagaaaggtaaagaagttggcgtagcacaagtgtcttatggcaatggtaagtggctatatggaacaatcgcagtagttggaacaagaagtgatacaaaaacttttaaagattgtgttgaccttcttgaagaatccattcagaatcattggtgtctgatatggatgactgacaatgaagtgatagaacgcttcaaaaagattgatatcaacattgatagtattgagcatgttgatttatatgagctaactgagaaggtaaactatgagagtaattctagccagagataaaaagacacggaaactcatccggtcagcagtattcattggaagaaatgaagtcatcccgtttacagcaaacgatgtgatagcctacaggaaaaacttagtatttagtgattgcttgcgtggcttcatctcccaaccgttggaagactttaaaagccgttgtggtaaaggtatcatcattcaagaggcaattatcaatggctgacttctgcaaagactgttctatagaaatgtttggacgtgatacaggtgacttaaaaggtcttatcactgaagatgactttaaagctggctacgcaatgccagtaatctgtgaaggttgtgggtgcatctgggtagaccacgaaggacagcgtgtaaaaccttcagaagataaagaatcttgggagagatgttaaatgggtattgtaaaaatcatcaaaggtgatatctttgatgcctttgataaaggcaaatttgatatcattggtcatggttgcaactgtatgaatttcatgggtgcaggtattgcagcaactatttctaagcgttatccaaaagtgtatgatactgacacagaagtttacctgtttgcaggtggcattcgtcacaaaccctgtgaaaatttactaggtaatttctctgtagcacgtttaaaacaaggccgtatagctaacctttacacccaacttcatactggtaaagatgcccgatacagtgctttagagtcatctttgaaacagcttaacagatactgtgaagttaaccagttgaagaaagttggtctacctatgattggtgcaggtatcggtgggcttgaccctcaagctgtcacagttatcattaatcaggtgatgaagagtgtagatgtttatctgtatgtctatgaagcaaaaatgtataatgagttacactcaggttggaaaaactactgtgaaccagaatactttgcaggtgtagttgtgttcacagataacgaagttaccctcttcagacgaagaaaaggtaagatacatcaaagtaaccctccggttgaaaagatgtctctgagtaacgctctagttacccacctgtcgaagagcaatcacaggattgcagtaacatttggcagtgatgcagatacttatatctatgcaagaactgatgaggatatcgagacagttttctcttcgccagaagttaccttcttagacgcaaagaactaagaaacttcgtaggatattcacaatagactaagcctttcttatctggtaaatttttcaggtaaggagggctttttcatttcagaattgtgcaggtatatttctatagagaaatctgtagaggaaattttgaactccaaagagaaaattcattttcaaactgtgcaggtaatctccaaagggttttttcattttcaaaacgtgcagagaaaaatcaggtcgggcaagaaaaatcattttagatttgtgcaggtaggtttttatagagagccagaccaacccctctccccctcttactccccctctccccaaaagtcaagagaaaaatttgtagcggattgaaaaataattcttgatttgtgttctgttttgtggtagtcgtgtgcgcccgtttcattacagttttgccaaaaatatttttaaaattttttcttgactctttgaacgtggttatctagtatttgcatcaacggggagggaatgaccttccccactaaataaagtcctaaactggagattcaaaaatggcatatcgtgcacctaaattcatcaacaaagacaactttcgcaacgcactggagaagtcacttgatgaaaattttaaaggcaacattatcgttgttcacgcattcaattttaagtatgatgtaaacgggaatagaatcaaccatta

SEQ ID NO: 198 - DNA, 90040 bp, Artificial Sequence
  Synthetic polynucleotide
acaaatagtgaagagataaaccaggttgagcaagaaaaatctttttattgtagtgcatatagatttattaagagggctagaacacatacgaagatagccttatcatcaatttatctaagaattataccaaaatttttagcaaaaagcaagaaaaataaaagcctgatctgctgagatcaggcttggttgattaatcctctggattaacatccaggaaatttttaatagcatcgtgcatagtttctttacgaagctgacgtccaatcaaaatatgaataggttcgactcgaccattaggtacttgatttgtgttctgttttgtggtagtcgtgtgcgcccgtttcattacagttttgccaaaaatatttttaaaattttttcttgactctttgaacgtggttatctagtatttgcatcaacggggagggaatgaccttccccactaaataaagtcctaaactggagattcaaaaatggcatatcgtgcacctaaattcatcaacaaagacaactttcgcaacgcactggagaagtcacttgatgaaaattttaaaggcaacattatcgttgttcacgcattcaattttaagtatgatgtaaacgggaatagaatcaaccattacacggcaaccatgttagatggtacgctatcaagtgaaaaagctgtactgaatgcacttgctggacgtggtaaaaacctgataaaatgtgataagagacgttatcagggtggcgcatatggttatgatgatgctgtttatcatcttgaaaatatgggctatcaagtagaaaaagctggagcgcctcaaataatcggtagtgatggttacgtaactatcttcaaaattaacaaataaagtactttacaaggggcttatagttcgataaagtaagccccagatagagagatttatcaaataaagcccttaaactaggagattctaaaatgaaattatcaaatcaagtgcgtgaaaatctgagcaaattactcaacaaaattgatttcattgaaacatcaaggaatagccatgatgttatggaatggttacacggcaaaataaaaggtcgtcgtgtagtgatttgcttatggaacagttgcagggagtataaaaaacctgtattgcaagtcaatatctatgatgacacttttaaaagtccagtaaagtctaaaagcgatttattagaatcctatgagataactgtaagtggcaaagtatcacgtaaagaggaaacaccatgttaatgactggtatcactgcaatcattgccattttcgcgctatataaggcatataaagcctataatctagcaaataaggcaatcacacagcaggttagcaataaccttgtagagagctttctagggcgtctcagtgatgagcaaataaagcggctagatatgagcttcagatataaagcgaaaacctatcagataagtgacatcttcaaagatgattttcagttagtcgatgattataattctctgataaatgctttaaatgtcagtgacttaaaagactactacgctgtaattgttcaagagttgagcaaacgaaaacaaaactgttgacactggtttttagatagattaaattacacatcaacggggagggaatgaccttccccactaaataaagtcctaaactggagattcaaaaaatgttttgtgcaggtgataaagttgtctggaatgatatagatgacggtttatgtacgaaagttgttgttatcttagaaattgattatatcactggtgttgcaactgtagcagataatgatataatctttgatgtcttaattagtgaactgtcaaaataaaatccttaaactaggagcttttaaaatgtatactactaacaacggtcgtactttaaatgtcacactacgtcactatgtgaacggtgtaatgcacttcgaggatttacaagctgaacagcacattttggattggcaagttgcaggactccaaaaaactgctacaggatacgggaaaaagattccaaccagttggaaagtatactacgaaggacgtttgcgcagaatttatcaagatgtgcaaagcaatagcgcatcgagttacattatagtaaaaggcaaaaaactgcatttaatgtaaagtactttacaaggggcttatagttcgataaagtaagccccagataaagagctttactactcaatcctaaattggagaacttaaaaatggctattaataaccgtgaattatcaattttaaaagcacgtttgaccgtcaacaggattaatgttctgacatcatcagcgcctgatgaaacattgcacaacattatcgggaagattcaaagtgttatcttagacgttgaaaatgtaaaaagttcattggctgacgttgcatcaggtatcacgctagacggcgcgcaatatgaaatgtcagacatgttaggcaaatctaaggtaatgaataaagagttagatttgaaaatgttccgatttgctgttaaagtgtggttatctgtcgagtatgatgctaactttgcaatcgctgactttttcgccacttggttgcagcgtaatttgtcaaatcacgattttcgtaatatctgcgatgcaatttatgcagaactctaaaaaattgttgacacttatttttagatagattaaattacacatcaacggggaggtattaaccttccccactaaataaagtccttaaactaggagattcaaaatgatgaattttttaaatatccctgatacttgccgactgttgacgcaaccagaaaatttaggcaaacctttcctgtaccatatgccagacaatacaccaaaaacatatagctacacagttaaccgctttacgggttacgctgcaaaaaacggttacaaggttactactcaaaaagtaacgctatttacaaatatcgaagagcttccaacaatcgctgtaaaactaatatttacgaagaagacgcaataaagtactttacaaggggcttaaaagttgatatcttaagccccagataaagaactttaccactaaatcctaaactggagattctaaaatggctattattaacggcgtatctatcgagactgtacacatcaaagacattaaagccggtgatacagttctttttcacggcgtagaaaaaactgtcactgcaaaggatattaaaggggattctttcatgggtaggactctcttcggtgattcttattgcttaggttatcttgcagttttaaaagttgtcaaaaataacaaataaagtactttacaaggggcttaaaagttgatatcttaagccccagataaagaactttactactcaatcctaaactggagattcaaaaatgaaatgttttcacggtactactcaagaaaatttcctcaacctgattaataacggtgataaaccatcaggcgcatggaattgttcggatatggacggcaatttttacgtgtatccagaaaataaaatctatggcgacgatgaggaagaaatagcatcagagggcattcagcaagctctaggtaatgccactatcaccgcagcttttcagatgaagactcaaaatattgttatcttagaactcgatattccagaggatgagctaaacgatgattattcttgtgataatatgtcgagtgtagcaagttttacagagtactttgatgtaaattggattaaaaaggtctatacaacagagtttaacgctatgtattcacctttttgtcttccttcattggataacccaaatttaaactatcttgatgagtctctggagcttcttgctaaaagtgttcaacagtcggacagtattcaggttttttgtgacatcatggatacactgacaggaaacattgcagaagaggatttaaagagctttttctaaaaacctatgcaatcaccttataaacactaatcagccccttgtaggggcttttagggggcttaaatcatgcttacaaccgtttaccttatcctttctatttgtaatggccattcatgtgattttaaagggcttgaggagttcacaggaagtaaagaaaatgctattcaagtttgccagatagcaaggcaagactatcccgcaagtgatgatattcagtgttactttaagacagaagatgacgacggaatctatttcgatagtgttgatggtcagtatgagattatcattgaaaaagactagacaagcctgataaaagtctgtaaattgtcaatcaacggggaggaaatgacctcccccactaaataaagtccttaaactaggagattcaaaaatggcttatgtaaccgtaattaccgataaagctggcgcatcttggtcaactcaagtaagtgataagatgtcacctatgcagtgcctaaaatactttgaacagtggaataaaggcgaggacacaagcccctttcaagtgatgcagattatccatgtagacaacgaagggaataaaacgacactgaatagtgagtactatgcaagccgttttgaaacgagaagtaaaacaatgaagcttttacgtgaatccggttatgcccatatcgccgcgttaatctgggatgacctgctaaaaagtcagcgtatcagctatgtaaaacctgaaaaaatattcatcagttaatcaataacttacaaaaaacttttaaaaaagtgttgacaataccccttgacattggtaactttgttcgagggggtttatctaaaagggattcacttaaaagactctttatagataagctcaaaaaattacttgcaatcagctatcaaaacaagtaaattactaatcaacgggagggatgacctcaccactaaataaaatccttaaactaggagagtcaaaatgaacaagtttaaagctatcaacttcatccgttcaaatgctgtaatgtctaagcctgtaaaagatacatacgaatttcgttgtaatggggtacactttgcaaccatcactaagtcagaaaacggggcttattatgtacatcgtcgtaatgttgcaaccgttgtagtctctcactttatgcaagctgtagcggaattattaccgttattcttagagatttacttagatgagtgtaaaaacgttcacaaccacgttaaaaaccttttaaacggttataaaatggcttatgaacgttctatcaagtccttaaacaagttctataaagcccctgaaaatactgtatcaatagcttatgatgtaagcggtgaaatggtcaacctctccaatgtagaacaaattggcctttatgacttacgtcctaacggttacgctaaaactctcggtgaaggtttaaccttcaatatcaagaacttagaaaaaactttaaaagatattgaaaaagatattgacgagacaatcaaaagtctgtaaattatcaatcaacggggagggaatgaccttccccactaaataaagtcctaaactggagttatcaagatggaaaacgtagaattaaccacactattgcagattgcaaccgacaaagaagatgtagcattatttcaccgtatcgaaagcgatttgttcaatggtgaaatcatcaaagaatcttatgaagttgtcggattcaaagatggtaaagcgtttggattctttgacctcgacaaaggcaacgctgttacaaagtatgatgttttgtcttgtgagattcttacaaaatacaacgaaaaaaggcttgcaacatacgccaatatgcagtaaattactaatcaacggggagggaatgaccttccccactaaataaagtccttaaactacttcctaaactggagaatctaaaaatggcaactatccgcgctactgttaacgagttcggtttttcctctctggatgttaaatttgacattgcaggcactgataacgcctttgaaatggtgaaaggtcttatcagtcagaccatcaaagattataatccttcggatgagttctgggaggaaacaaaacaagaagttctcaaggatggttatacttatcactattggggagaaaaaattgtctccctgtactacaacaaacaagattataactaatcgacgcagcggggctatttagccccagatacctgaacagcccctatttaaaggggcttttttacgtctatcgaatccttatacaatccctttccctcacctttctagaatctatccactgattcgatagaatctatctcataccttaaaagcaataactctatagtctattctatagccttttatcaaatcaacttaaatacaagcccataacccgaaagggaagggcaacccctaaaacgctctataaagctctataacagccttatcaacctaacttaagggattgcattaacctatcttaaaaagctctttacagggctttatagaggcttaaaagaatcttataagggtgtaagctttatcatctcgttagttatcttgtgaactactaaaaagggcttgttattgtcttaaaagtatgttataggggctataaagttactttgaagtagcttaaaagttacgtaaatgctagcccccttaacaatttcttaacaatccctacatagttatgcttttaagacacttgttagcaacttgttagccccttgttaaatctctgttaagaccacgtaaaagccttgtaagagtctttgacatagccttaaaagctcctgtgaagccctataaagagttatctgtacagttggggtgtaactactaggaagagacttaaaagagcttataaagagctatagagagcttttaagaggtatgtttaaggaatcactaagaaaggaaagggaacgataagaaagagatagtgaccatgttaatagctagttaaaaagattaaacacttgttagaaacttgttaattatcttaacaaaataactctttaaaattaacttgttagctcttgttagtcatctgttaagattctgtaaaacctatgtatcaactgttaagaaactgttacagccttgttagttctgttaagaatctgttaagacctttgaagagttgttaagaagatgtgagaactgttaagagattgttaaggatattttaaaattttgcaaagtacttgtaagggagctgttaagggctaccaagcagatatacatcctaatcagatatttttgagttccttcaaagaccctaaaaaatgacttgacagtcttattttataaaaattttaaaattctgaataattacctacacagtcttttaaaaatacaggtagaaacaggcttataagataccttgttagtaccgtgttagaccttgtgagataaggtctgtaaagatattcctgttaagtttgttaaaacagactatatagaggcttagtatttcctagtgaacacctatagagagtgtcataggtaacatagagattaagaggtgtataggagcttctaagaaggtgtagagagatgtttaaggtgattgtataggttgttaagaaggcttgttagaagagtgtttagatggctatttagaagggctatacagagggctattaagaccactagatagttactaagatactatatagtactatataactatatatagagagtaagattaagaaggttgttaagaaggatagatattttattcacatatgatggtgacccagaggttgggacaaccgataaaattttataaaaattaaaaagcccccgattaaggaggctcttaagatattttaaatcaggctttctaaaactgtcttcaatgatgacttagttgtctgataaaaatgagtgaatccattgttgttatcgaatatctgcatcataacagcatctcccttgattgggtacactcggatgtcatagtgaaatccattaaagacagcagaaccattacagaatacactaaaatcatccactgagatatactcttcatgacctgtgatttttatacagacacctttactcggtctcttagggttgatatcttccataatagacatactctgtccaccaagagataccatagtgaccactttacggttcttctgtttaaagtacattttaactttctgcaaagtgtcttcatagaacggataagacctttctacaaagattccttcaagtggctctttaccattttcaacttctctgttatgccgtacttcaaagataatttgttcgaaccagtcaagattttcttcggagagtgcttctcgaacatcactccagtcaagtactaggtagttaccttcaacttcttttaagttatctttttccatatctatcacaccattatcgtaaaacttgatattctggtactgcgaatttattactattgttcttgatgaggtcatcctctgaaactaaaaatgtaataccacataagtgtctgtaacgactatcatactcgaatatcttaaacagatatttaccatcatgataaacctgttgcacttcaccttctgcaacaatctcgcctgtaataaaattttttagtttatacacattaccaactttaggtactgttttcatctcaggctcttttagtgctacacctatttttgcatcaccgagtaaatgagaactctcaaaagctacgtgtttcatataagcttctgagcattcccagataaaacagtgtacaagaaccttagcagcatgtcttgaacagtttaacttatcacaaatttctgtgtacatctcatctttagtcgagttgtcaagcattgctctttgcactatctcttttactttcataagctctccgaataaccctattaagcatctctaaagtcagttttccagactctaaatgtggcataacaagctttaaagctttttcaacatcatgcacaacatctattataccttcttcataggcttctacaaggatatcttttacgttttgttggttatctttttgtggtattgctagacgcatattaaactcatttgcttgagggtggtcactaccacgccagtaaccatctttgttaaagctgatgtagtcaccgtggtaaaagtgtacaccattagctttaaacttctccagcacaaggcattgaattgggtactcagtattccactccctgactcctataaccttcactgttgcgatgtactcctgtgtttttgcatctatgatgtcaagttcttgaccagctatgatttgcatattcgctaccttctaagtttctacaaaggggctatcaagtaacccctcaagttattactcagacttttcagtcttcttgtcggatttcttactagtcttcttctcagctttctgctcaggctccttctcagaagttgccttaataaccatatcaagaagctctgataagtcactcttcagtaaagtaacaggctgctcattgtagaagtttttgtcaagataaactttaaactcttctatagaaggaaatccaaaaattggtacaggtgtcttaaccattacttagtctctccataagcatctttcaagattgccttgttaatcatttcagcgattgcaaaacgaacacatacagctataattgtaggttgcattctttacttacctcttcaagtttaacttcagagtccttaagtcgtttcttatgaactctgaatctcattagtgagatgatgataccaactaaagggacagcatacaagtaccaaacatcatatacctttgcagtaatctgtgtaatggtcaaatcttgagctatggaactgattgctgatactgccagtaatgttgccaagaaaaatgccagtaccattactgtactcaaacaacctctggcatggtgttcatgcttaatgcacttattcttttcgtcaacaactctgttgtagtcgtttgtaaagtctctgtagaatgctttcaagtattcttgagtgtagccttcaaagcaacctgtaccataccaataatcaccaccaaaatgtgctatgataccggtatctccatttggttttgttactcttagggagacatgatgaccagtcttctggtaatctatcttgtatctttcttcgtaaatcattttccaatccctctcaatcgtttgttccactcaaggtcaacaagtctttgtaggactttacctctaggtgttacaccttttaaatctgcgtcatagcaatggtaaaaatcaccttcagcgtgtctgccatagcatcttcttatactctgacttctacgatattgttctaatagagacagcttgtagtaatcttcaactgtagttagttttttcattctttcaccatagcatttctgaactgacgttgagtttctcttgtaatttcgtctggagtaaaccctgctttcagcatatctctgaaaagaacttctaagtgattcttttcaataatgtaaattgcattctgcacagatgttttaagttccttcaggttactgctaatttcttcgcacttgttgacaatctctgtatcaactttcttaaagactggcatggtatatctactaccaccattagcagcatccatgaaaaatttaaaagattcctcagagtcctttaaagcaatccctataaagttcttgtaagcacctgtgaaagctaaagattcaatctcagcagttgagtatacagttcctgcacacagtcttgcggaggtactaaatgtgtggtttggtgttatgtcaaagtctaagttcttcagtggtcgaaaataaactatcccattgtgtgagatgtgtgttacaacagcctcaacactctttgaaggattctgtttaacatacaaaataattttatcgtgttctttcactttagccatatctattctccagaaactaaaaagggaactacctctcgatagctcccatcataatcaatattgtatactcggtcaagagtattttttaggcagtaatgcactgcgcttgttactctcttcactcaacagtgcgataaattcatcacctttacccttccacggactaaatgtagggatgtgttctctgatagcatcaatcactgttttcagggcgttattttttaaccaccaatcagacactgctgatgctacaatataataagcaccatcatctgtgaagattggctcagagatacatggtgaaatcatagtggtgatgatagagccattattcatgtaatatgttcttttttcaaccttatcaagaagcttatggaggtctgcaaagagactcacaacttctttatggtcaatatctttttcaagatttgctctgtatttcagcagtgcagcatcaacctctttatcattgaatttgaagtattggacttcttcattcacacatacactgatattgttggtgtttatcgtcaatttgcacagtttgactggagaattgatgttagtctgaaaaagtgctacacagccttctacatttccgaaatgttttactaatgtaacttctggttggatatgctcatgttcttctgacattacagtttcctcattaaatactttttaagttgtgtgttaggtttctcaaaaacttctatagaagatatcttaacagactcaccacgcataccagtatgtttgaatatgtagtactctagcatccctatgtactttgctggtaagtcatgcttgacatataccgtcacagaatcttcaaactcaacaacctttgtaccatctttgtagttaaactctttaggatggttgtagttgtctatatcgtacattaaaaagagtcttttacgttgtaagtcaagcttatttgttaaagactctttaatatctgagaagtttttgtacactatgacatggagcttactcatcgttaaactctctgacgaagaaatagttgactttgttattacctaccataaggtcaaagcaggtattttcaaaaggtttgttgtaggcatcgtatgaaatatatgggtcagctacttgcttagtgcttaacttcttacttgatgtatttaagaggccaccatacagcttcttgatagcctcttctacaacagaccagataatttcgtcagtaatttcttcgtacaggtcaagttcacgctctagtgagaagtcacaaatagggaaaacaacctgtactttactcattaacgaataacctgtgagacttgaattgcttcagttactgacaagtcacctactttctcttctttgataaaagtgaatgtgagttcaacaggttcttgctcttcttgctcaactggaatgccattaagctcatcgcggattgattgagttgtccagtcttctccaccatctggataatggatggcgtaaagagggaactccatatcataccagccaaatacagggcaaccatctgcatcatctcgcattctgcgaagtgtgctacctgagcctgtaaagcgaagactaatatttccattacactcaaaaatcactgcgtcggcaagtccagcatcttctcgaccatcatggccaaaagtgtcaacttttacttgaatctctttattcataaaaacctctctctgcttgttctatttttgctcttaaagcttcgcaatgttgtaaatgatatttagcttcttgttcatgtgttgctaactgcctttccagaacagatttatagtaacctgcaagttgctcttttgtcaatgggtgctctgaaataatatcaagtccactttcaccaagagggttgaattgtccatgttcgttgacattgtaagtctcaaacttgaacaggccattgttcacagactcaataggtgacaactcaacaagctctacagtaaaccgtgtatataccttgtcacctcttgaaaccacattgttcccgacaatgcgtacaagcgagccattacgagtgtacttaaaagttccaaagtcactagcccaaagtttcatagctttctccttagaaaataaaaaaggctcccgaaggagcctatgaagatattactttggatatacactgtcaagataaatgtcagcttccatcctacgtctgtttttcaggccgtttgaagtgaccttcttacctttgactgtaactttgttccaccactgcatagcttctgcacaacctaccttattaccatcgttgtggcgcttgataaatgttgagtcctgcatagctgtgataccgatgttgtatgtttcacttacaagtgcatcgaactcattctgagaagttggaaccttgatagctttgttcactgctgcaacgaacttttcaacatccgcgagaagatactgttcagcttgttcagcggtgattttcattcccatcttaacaggcttaccagcaatacggatagtcccatatccaattgtagggattccagcagaatcttcgtaagcctctagcttaagaccttcaaagaacttaatagcttctaaaccttttcttgagagttgcattatgcctcccctgctgggttaactgtaactgttgctgcattggatgttacagagccacctgcaccagtaactacacaggtgtaacttcctgcatcagcagtggttgcaccttctttggtgtaagttgcagtagttgcatcgaggatgtcttcctcacctttcttccattggtaacctgtcgcacctgttgccacaacattcaacgtcaaggtctcaccttcagtgatttcttgattggttggctgttgagtgattactggaagtgcatttacagtaactgtggctgcgttagatgtgacagagccacctgcacctgttacaacgcaagtgtatgaaccagcatctgttggcagagcaccagacttgctataggtagcatttgtcgctgaaggaatgtcagagccatctttcttccactggtaacccgttgcacccgttgcagtcacttccaagctgatgtttccaccctcattgatggtctgactagaaggttgctgtgtaatcacaggtagtgcgttaacagtaactgttgccgcatctgaggtaacacttgtcccagcctctccagatacaacacaagtgtataaaccagcatcagaaggtgctactgactgttttgtgtaagttgcagaattggcactagggatatcctcaccatccttcttccactgatatccagtggcgttagttgctagaatgcttagagtaagtgtgtcaccctcattgactgtttgacctgttggttgctgagtaattgctggtggcttgatagcatccttcagcttagcattcaacattgagaacggattaactcttgccaaccattcacagtaaatagtgtcaacatctttaccattgatgattgcatactgcaaatccatgaagaaatcagcagttctcatctgtgcaccaacactgtaaaggagttcatcactaaaaggaactttatagtctggtttatagtcaaacttctcaacttctgcaatatcagcttcaggccaatacgagctataggtaagtggtaaaatagcctcttgatatgttctaaaatcatacctcttaccagcctttacgtttgcaacgaagcccttcacaaactctttgaagtctgggtaagtctttgctttaatcatttcttttcagcctctaaatgtgcgtttagtctaaaataacctttgtgattcggagatacatcaccaacaacaatacctttaaccttataacctttaccaattacatactgaatatccataaggaatcttccaagaccaacaatatggaacattggatataatagattctcagagtctggaatattgatttctggtttgtaggtgcgttgttcgcttgttggtgtaatatcttcttcgggccatttactgagtctccatgtcaaaggtgttgggataacatcattaaggttgtacctttcaccattttgcacggaattgatataggattgtaggaagcaataaaagtcttttgcactcttagctttcattaaatatccttataaatagttaaaggggcatcagcccctattcacacttaagctttggtcttaagtaggttcttaagttttttaagattcatactctcatcaaacttaaaaccaaatccattgacataatcaatgaactcggatttcttactgagtgacaatgcgtaactcatatcaaagttcttacttgtttctgcgtctggactagagttcacatcaaatgaaatttctgtaggctcttgcttactttttctcatattatcaatcaacaaacatgtatagtttgctggatagaaatttacactaccatcaacgtagctgtacttattattatggataaggttggaaaataccttaaggaatgtttctgagtcgtggcaaacaagtttgaattggctgctctctccaagcgcaactaatgagtacggactttcactatcaaagtcataatttggattcgatgacgtcactgttacacgcatcaagttattagcaatagtcttctgtttaaaagaattttgaacatagtgaagacccctctcacactgattgactagctctttaagtaggtcatttgcatatggtgagttaattgatacagagccgtcactattgtaattaaaacttactgttaacatttttcagttctcctgcgatttataattttgctgcaatagagaaacgaagtaaactcactggaagaaaccactaagtgttgttcactagattgagccattgccctgaaatacattccagtcaaagcatcatagtgactattctttccaattgaggttatatagccatgactctttgcagtttgatataaatctataatatctgcgatttctaattgggaactacacatagataatcctcttgtcttctgtaattttgaaagaacaggtacagaccaatttcagaggatgaatagtagattaactctaccctttttgattccttacagtgattggtattcttacctttcttcggtttatttgattttctcattaagtctcctttgtagaacaaggcagacctacagctttaagtaagatggtacagtaatccatacaacaagtcaagaactattgcaagttaaaaaagttgttgacaaagtacttgacaaggtgtaggcttataaatacttagaagataacttaaaaggttcctctaaaaaggctatttaaacagatatctttctggatatctatcttttatcttaaaagccttttaagaggtcttataagaggcataccaatgaaaaacagaacaaacaaaggccagtttaaaaaaggccagtctggaaacccatctggaagaccaaaaggctctcgtaacaaaagttcactcgtaaaagctcaactgaccattgataattctgctgagtttgctgcaaagttgtttgaagcgattgttacaagggacgctgctaagcttgcagagtttgggttaaacacagacgacgtaaccatcaaaagcatgattgaggtcggtaaaactatcatgacccactcagcaggtgaaatgaaagcaattgcagcagacactaagaagactcctgataatggtggtcagtctcagacagacaacaaaccaacgttctctgctgttgcaacccttaaaaaataattttaaaagatgttgacagactctataaagttgctctaaagtctgtcacatcaaacaacaaatgagagaagagagtaaaatatgagcgaattatttaaacatgcgcaccttcatgcaggtcgaactgaaaatggtgctgtaaaccatacttcatcaatgtctgctcttgtagacttttacaaagctgctggttcaagccgtagcaatgtagaaatcttaccagacctgttctacaaagctttgcgtgaggatgttgatgttgcagttcgtattttgcttcatatgcgagatgtacgagaaggtatgggtgagcgtaaagccttcagaactgttttgcttcaagcaattgaagacaaagttttagagtctacgcaggttcttcgcattatggataagattgcagaacttggtcgttttgatgacttcaaaatcttcgtaggtactcgtttcgagacagatgccttcaaacatttagaagcagcattactagaccctgcaacagcaggtttggcggctaagtggttaccacgagtcaaaccacgtcataagcagtttgtaaaacgtttctgcaagtttgccaacttgagtgagaaagagtaccgcacactgttgtctgcactatctgatacagttgagcaaaaaatctctgctaatgagtttggtaagattgactacagcaagattccttcacttgctgctgcacgttaccaaaaactgtttaaccgtaaagatggagagcgctacaaagcttacattgagtccttatcaaagggcgaggctaagattaatgctggtgctgtttacccatacgatgtgattaaatctgttaagtatggtaatgcagatgttgctaatgagcagtggaaagcactaccaaactggatggcagaaggtgaaaacatcctatgtatgactgatgtttcaagctcaatgtcttgggtgaattttggttcaatcactgcacttgatattggtgtatcacttgccttgtatgtagcagaacgcaatacaggttgctttaaggatgagttgatggtttattcaacaaaccctcatttcattgaactgagtggtgatttacgaaaccgtcatcgtcaggtgatgcgacacgttgaatatggctcaaccaacttacaagcagcttttgaccgtattcttgagacaggtaaaagaaacaacttgactcagaaagatatgccaagtaagcttatcatattctctgatatggagttcaatcaggttgatggagctaacggtcgtacaaactttgaagcaattcagagcaagtacaaaaaagctggatatgagatgccacaactggtattctggtacttagcaaaccgtaatggtacttgcgaagtgtccgttaaggataacggtgtagcaatggtatctggtttctctccagccactttaaaagctctgcttggtggtgagaagtttgacccaatcagcgtaatgctcaaagcagtaatgattgaccgttatatctggtaaaaaagttttaaaaagggtattgacaatgtgtttaataccctttaatatgttctacatagaaacgaaatgagagcttttctaagatactgaaaaatattttaaaaaagttcttgacaaccactaaaaaataatgttaaagtggttacatagagtttgaaaagtttatctctgtttagctcagcttggtagagcgttccgtttggggcggtaaggccggaggttcaagtcctccaacagagaccaaattaatgttccagtagacaaaatggtaaagtcaccactctttcaaagtggatatctgagggttcaaatcccttctggaacgccagttttgacagaagaccaattacagcaaacttaatcttattcatctgaaggtaaatcggacaaagaagagatttggtctggtcattaagaattgcgggtatagagaaagggcgtctcacatgtctcattagcatggtatcggcaggttcgactcctgcacccgcctccaaatttacagaagaccgtttacagcaatatttattaaatttttagcggaaaaattgaaagatacggtctggtaatactaaacatggttaggaagcacataaggtatgtgcggtcgcctgttaagcgaatggcacagggttcgaatccctgactaaccgccaaatttaggagagaagcgattgctcaccgatttgtaaggtgcaagtccttagcctgaatagaaattaaatgtgtcgttatcccgtagatggtagcggtggggactgtaaatcccttgtcattgagactcggtaggttcgactcctacacggcacaccaataaaggttatgtagtttaatctggttaaaatactcccctgtcacgggagatgatgagggttcaaatcccttcgtaaccgccaattttgagagggctatttagcccctcccttaaagggttcttacgagtatcctttaaaggagcggaagaccaaatacagcaagtacgtatgatattttcaagccaatttaattttgaaaaatttaaaacttggtctggctcaacaaatttacagaagaccgtttacagcaaaacttaaacaatctatttctccggtaaagaaaaggtgaaggttcgattccttcactcggcagaggtcgagttggtgtaatggtagcacttaagatgataaacaacggtctggtaattatctttgtagataagttattaagcttacctgtgagtatgcgaccacaaagggtgaaagggtaaattctagatttaaacccaaaaaggcacatcgctacagaccttaagcaagtctgggtagcttatctacaaagataatttaatggaagtgtagcagaatggtgatgcggcagacttttaatctgacaggcgatgggttcgaatccctccacttctaccaatatggttcagtcgcagataaggtaatgcaggggtttcataagccctatgaatatgggttcgattcccatctgaacctccaattgtgggttagcataaatggtaatgcaaacggctgataaccgttagaagagggttcgataccctcacctacaaccaatttcaataaagttgttgacattgagatgtgactactttatagtaaccttagttttcgttgcgtagcgtctattttgcaaatttaaaataaatgcaaacgacaatgtttttctggcagtagcttgataggctaaacaccagtgaggtcttccaatccctcatcaaagaatttggcgtactcgcccacggtatgattaataaggtgggcatctttaagggctttctaagagagtctttaaagataattacggggcgtatctcagcggtcttctaaaccgccgttaaccgagtaagtggagtatgcgggttcgagtcctgccgcctcgaccaatttagttagcagattacttagacgacctaagcgggtcttcctgtagggaggtggtctgtatctcatgttttccagaacatgtaaataatctgagaaggggctttacagtgttgagataatacggtaagcttcgaattatagtatgggacgatgttaagactctaaggcatgagcaacggcctccaaaaccgtttcaaaggggttcaactcctccgtcccatgccaaagtcttattaggggtaggtagcggctaatggcagccaaacagtcttgaaaactgttgccactgtagagatacggtgagggttcgactcctttacttaccgcctaataagatttttaaagccaagcttcattcggatgttgctttggtatccctcgtgtattgtcgtacacactgataaaacacctagtaggtgtcacggagaagagataatatcaagctctccaaaggttctagtcaccggattaaacaagactatgcaaagaccttttaggtctttttagagggcttctaaggttattacggcttgttgtggaaccttgttgcttaggttcttagaagttctctaaaaagatttaatgggagattgacggtaattggtaaacctaccatccttagaagttggtgtttgagggttcgaatcccttgtctcctaccaaattaatgcaggtgtagcaaaatggttatgcggctgactcttaatcagtaagacgatgggttcaattccctccacctgtaccagacattggggtcatagtttatatggttaaaattcgagttttgcaaacttgggaactgagttcaattctcagtgactccaccaattagtgcatccatagtttaaacgggaaaattacagtcttccaaactgaggttgagggttcgattccctctggatgctccaaattaatgctgctttcgtataattggctattacacatcccttgtaaggatggagatgcgggttcaagtcctgtgagcagcaccaattcagaggtcaagtgaaagaccgctttgagtcaactgaagaccgtaacaaattccacggagttgagttagcggcacaacttcagacctctttcacactcgcttagtttatatggtaaaacatcacccttacaagatgaagaaaaaggttcaagtcctttagtgagtaccatgttccagtatcccaattggtagaggatgcaagctcaaaccttgtactagtgacggttcgaatccgtcttggaacaccaattttgcaggattagttcaaatggatagagcaacagtctacgaagctgttaataggggttcgaatcccttatcctgcgccaatttaaagaggctatttagatgagatacttaaagtatgcttcatggattttcttagctttgttagagccatttgcagaaatcttagcagttatcttagcaccttttgtagttccattctacagtgagaagaaaggccacttacctttcggatttagatggatggagacatatgacaacccaattgatggtgacgaaggtcatatcgaacgatgggctaagattagaaagattggtaagctgggtgtctacatgcagagagtcggatggctctggagaaacaaagcttataacttctcttaccatgtattaggaagagatgtaaaagatgttactaagtggaaaggtaatatcaacgtaagttctgaccctgaagataatcagacaggttatctcctaatgtggaacagtaatgcttggggattattcgcttttatcccatcaattaaagtctttggtaaacagttttactggagaatttatattggatggaaactaaaaagtgttgtcccagaagaaagagcattctcaaggggaagagttatgttggcattctttattcatccactaagaaagtaaagatttaaaggggattagtttacaaggttaaaacctcggtctttgaaatcgaagaagttggttcaattccaacatcccccgccaatgctccattactccaattggcagagaggccagacttaaaatctgtgttatgtatcggttcgaatccgatatggagtaccaaatttagcggtatagcataactggcaatgcaacagtctctgaagctgtcctattaaggttcaaatccttatgccgctgccacttctaagggttcttacgagagtccttaaatgtggccttatcataaatggtaatgacccatgctgtgaacatggtctatacgggttcaaatcccgtaggtcaccccaatttatagtccaagtagcttatatggttaaagcgcgtgtctgaaaaacatgagaagagggttcaaatcccactggactaccaatttcaaaggtgcttaatgaaagagatgacagaacaaggtaaggagatttttaatctcttaaaaaccggtaaagggttttctaacccacttattactggtgcagcagttctcggtggaaccgtagctgcttctacatcacttgtaagctctattagttctgtaacagaccctacaatgcaggagaaacttgttgctgctggacttacaacagtccttctaaacagctttacaacaagccttacaagcactacagcaactactaagaccctgacagactacggtcaaaaatctattgatgagttttcatcacgtatgcaggtagcaaaggggtattccaatgttatgggtgcagcaggagaacaagttggttgtacaccgttcagtggtattatgggtgttgctacagaatatggtcaaaaagctattgatacaattaacagtacactagagagtgttaacgatgtattaagtgacttacaagacgctattgatgagggtcttgatactatttctgatttagctaatcaggctgttagtaagattaatgaaggtatttcaaagattacagcttatgcagatgaagttgtgcagatgattgaagaagaagctgcccttattgcagagtaccttaaaacgaatatcaatgggttcttagcaggtatcttaccagactggtttgacgatgcctgtaaaactggtgtaattgacactattgcaacaccagaaatgaagaacgcattacagaaataaatggaagattaaccctaaaaggtaagggagcagtttgctaaactgccagtagctgagaaatcggtgtaccagttcaagtctggtatcttcctccaatttgaatccgtgacagaaatggctatgtgcctgtctgcaaaacaggtttataagggttcgagtcccttcggattctccaagttattttactctctctcaattaaaataataataataatgccctgctataagtattcttcctttcgctaccgaagagtatttttagacagggcttttttacagagttatactttataagaaggcttatacagtatgtctctgacgtacattgtggtttctccttgacggtctctgtgccgtcttttttaaggggaaacatggttaattatttggagaaaacataatgagtgagaccgtttacaaagaactttatgaagctaataaaaagctagaatttatgcagaacactatcatggcaattgcagatagattatctgtagcaacaggcattgatattaaagaagcatctatggatgcactccttgatgctgttgatgaaaagttcgaagttaagaaagaagagactgctacagactctgaataattctatttgcggaggcgcttaatggacttaaatgctgttaagcagaagcgagtggaagatgttaggaaagtcctagctggagagttggggctttctgatgaagtaaaagaaattattaaatcattcggtaaagacccctctaaattccttccaactcaaattctgactttattaagatacacaccagaccaagttcgcctcatctttaaattgatgactgataagaactatgtagcccctcaaccgggttctcaagaggtctttttaaatactaatgctgacttggttctctatggtggtgctgctggtgctggtaagactgccgcattgttaatggactctttaagatttattgaagaccctaactataatgctgtatatttccgtcgaaatacaacacagttacaaggtggtttatggcctgctgcaaagaaactatttggtaagtttggtgggattcctcatgagcagaaaatgactatcacattcccttctggggcaactatcaagtttacctacctagaacttgaaaagcacgctgaaggtcatcagggtattgaatactcagcaatctactttgacgaaggtacacacttctctgcttcacagatttcatacctacagactcgtctgcgttctggtgctgaaggtgattcatacatgaagatttccatgaacccagacagagaccactttatttatgattgggtagaaccattcttagatgaagaaggttatccagaccctgaaaagtgtggtcgtattcgttggtatgtaatgaatgatggtgtgatggtttctgattgggagagagacaagattcttgaaatgttccctcttgagattcctcaaacatacaccttcatctctggtacgattgatgataacccaattcttgacttcttagaacctaagtaccgtggtaagttggaaaacaacacccctgtaaacgttgcaagacttcgtttcggtaactggaaggctcgtgcagaaggttcaaactactggcaaagacaatggtgtgagattgttgattcactcccagaagatgtatttgatgttagagcatgggacttagcagcaactttaccatctgagattaaccctaatccagactggacagcaggtgttaagatgggtaaatctaaaaaagacggttgctattatatcattgatgtagtaagatttagagatagaccctctggagtcgaaacacaaattaatttgactgctgaaagtgacggtaagcgaactggtatttttatccctcaagacccaggcgctgctggtaaatcctacgcaacatccctcatcaggaaacttgccgagaaaggctatcgtgcaagagctaaaccaacaaataaagataaagttacccgctttgcgggattttctgctgcttctgaagctggacttgtaaaagtcttgagaggtagttggaacgaagcttactttcaagagcttgaaggcttttgtggtgatggcaaaactaaagatgaccaagtggatgctaccagtgatgctttcaacagtcttaacgaagttaaattattcaagccaccatcaatgggtgctcacacagacttagtgagaggaaacccatatgaggggcttagacgttgatagctaggtgagaagaatggcagatattacagaaacacaagaaagcttaccaccatttagaatgggtgaagtaggttctttgggtctgaaggttaagaatggaagaatctatgaagaacctcgtcaggcactaaggttccctgaaagtattaaaactttccaattaatgatgcgtgaccctgctgtagcagcatctgtaaatattattaagatgtttgtcagaaaagtcaactggagattcgtacctccaaagggaaaagagcaagaccctaaaatgcttgaaagagcagacttctttaattctttaatggatgacatggagcatgattgggcagattttattaattctgtaatgtcattctgcacttatgggttttgtgttaacgagaaagtttataagaagcgacagggtaaaaaaggaaagtaccagtcaaaatttgatgatggtctaattggatgggctaaattaccaatcagaaaccaatcaacacttgataagtggtattttgacgaagactttagaaaagttactggtgttagacagaatctgagaaatgtttcacatattgctggagcaattaatcttggagaaagaccactaacaagaaaacttccacgagctaaattcatgctgtttaagtatgatgatgaatatggaaacccagaaggtcgttcaccattacttaatgcctatgtaccgtggaagtataaagttcagattgaagagtacgaagctgttggtgtttcaagagacttggtaggtatgccaaagattggtttaccaccagattatctggatgaaaatgcagaacctgaaaagaaagctttcgtacaatactgcaaaactgttgttaatgatatgattgctaatgacagagcaggtttaatctggcctagatatatcgacccagatactaaagaggatatttttgagttctcattagtctctagacagggtgctaaagcatatgatacaggttctatcattgacagatattccaagcaaattatgatggcatttatgtcagatgttcttgctatgggtcagtcaaaatatggttcattctctcttgcagattctaagacaagcttattagcaatgtcagtagatattttgctgaagcaaattaagaacgtaattaaccgtgatttagttgcacagacttatgctcttaatatgtgggatgatgaagaacatgtacaaatcacatatgatgatatcgaaactccagaccttgaagcaattggttcttatattcagaagactgttgcagtaggtgctttggaagttgacaaagagctatctaacaaacttagagagcatattggtcttcctcctgctgatgagtctcaaccagtatctgaaaagctttctccaaatagccaaagccgctcaggagatggttataagaccgctggagaaggtactgcaaagacaccttcagcgaaagacccaagcacagcaaataaggcaaataaataatggctgaagttatctctatttcaaatgctacacgagtgcattcgtataggggtgtccttatcattactgataagttatctgtagaggctggctcaagggtcagcctttcaggttatgttagtgatggtggaatctctgacgttttcactatttgcaggttacttgatgcaccaatgagtggaaaaccgtttatttcaggaaattgtagtgaaattgttaaaattccatttgacagttcatgccttttgggtgtaaagttatataactgcgagaataaacgtatcaatgttaatagcattgaagccgctttcattaccctcgatactgcatttcaatctccaatgacagttaataaagaaacaaacagacttgaatacattttttcacaaaatgattacaaagtacttgtcaaaggtaaagtatatgatatgattgtaaatgtggtagatgaatctggtaaccattcaacagtccttaaacaaaaagtaaggtttaattaatgggaacattaactattgatggtaagaataaaatcctcgccacgctaaccccaacgactattattttacacaatgtagacccaacggcagaccctacagcaaataaggttactcagccagtggctatttatttttctgaaccggataatggcttaattgcctcagaagacacagttaatattactgtcccagcttctgcaacggtctcacactatagcttgtgggatgctaacgataaatgcgtggcaactggtgctcttagcaaacctcaattctttgctgaagaaggtatctatgttatctcttcagtctctgtagatttaaacaaatagggtgagtaaaaatgagttcgaatatcttcagacttgctgatagattattcaaccaacctttactagccactgaatcattagctcactcagcagcaacttatgtgaataacagattgctgggtgatgtccaagcagcagtaaactttgataaacccaaaggtgaagcaagaagtcttttaaaagtaaaagatgacattgctattatccctattatgggtggtttaacccatcgtatgacattcattgatgcaatgtgtacaggtggattaagctcttatgaaggtttgcgtagaggctttgacgaagctttagcagatgagtcaatcaagactattgttctgcacattgattctggtggtggtgaagcttcaggttgctttgaattagcacgtcacattatggcttcaagaggccaaaagaaaattattgcttatgtagatgagttcgcttgttccgctgcatacgctcttgcatcttctgctgaagaaattattgcatcaccagatgcagatgttggttctattggtgtaattatggttcatcaggaattaactaaggcatttgaaaagaatggcgtaacaattaacgtcatcaaagctggtgagtttaaaggtatgggttcaccattccaagcactctcagaagaaagcaaagaaagacttcaaaagagaattaatgatacctacgcaacctttacaggttttgtagccgaatctcgtaatctctctgaagaagctgtaaagaatactgaggcgaatgtttattctgctcaggaagctcttgaacttggtttaattaactcaatcatgtctcaagatgatttcttaaattacttacaaggttctgaagaggctcctgtaagtttaaacgttaacaattcaggtgaagaaatgactgaacaagaaaagcaagaactagaagctttgcgtcttcaggttgctcaaatgaaagctaaagaacaggaagctgctttgtcagatttgactaataagatttctgcttctgctgaagcttttggatttgatgcaaaagaagctgcaacgactattttaggtgctggtcttgataaccctctgagtgttctgtttatgaatgctatggaaggtgctaaccagaaacttaatgaaactatcgcgtcccatgcttctgcaatggaagaaaaagaatcagaaattaccaagctgaaagaaactgctggtgctgttcttgaacattccaacgctatggaagaaatgggtaatgacggcgaagctgatttggttgaagaagaaaaagaaccagctaagaatgcttccgaagacaccgctgaacaacgcaaactggctctccagaatgctctaaaatctcttatcaaataaggaacacaataatggcatatcaagattttactaagttaggtaaaagagaacctctgaatgatatcattctttgggaacaggttaccccaacaggccactctcgtaaagagtacactccacaggcatctacagaatatcgtgtaggtgaagttctgaaggaagacggtactaaagtcgcagcaggggaagaagctcaggctgattctgtatgtatcgttaacttttattcagacctgcaactgtcttaccacggtcagttgaaagttgttggtatttaccgtgacgcagaactgaaagacatgcttactcttgagtctggtgttaatgctgagaacgtcaagaaagctctggctgctaaaggtattgatttcgtaccaactggcctgtaataacaataataagacattctggagaattttacaatgttgactaattctgaaaaaagcagatttttccttgctgacctgactggtgaagtccagtctatcccaaatacttatgggtatatttccaacttaggtctgttccgttcagcaccaatcacccaaactactttccttatggacttgactgattgggatgttagcttgcttgatgcggtagaccgtgatagccgtaaagcagagactagcgcacctgagcgtgttcgtcaaatcagcttcccaatgatgtatttcaaagaagttgaaagcattactcctgatgagattcagggtgtacgtcagccaggcactgcaaacgaactgactactgaagctgtagtacgtgctaagaagctgatgaagattcgtaccaagttcgatattactcgtgagttcctgtttatgcaagctctgaagggtaaagttgttgatgctcgtggtactctgtatgctgacctgtacaagcagttcgacgttgagaagaaaactgtttacttcgaccttggcaaccctaatgctgacatcgacgcttctattgaagaactgcgtatgcacatggaagacgaagctaagactggcactgtaatcaacggtgaagaaattcacgtagttgttgaccgtgtattcttcagcaaactggttaagcatcctaagattcgtgacgcttatcttgcacagcagactccgctggcttggcaacagattactggttctctgagaactggtggtactgacggcgttcaggctcacatgaacaccttctactacggtggtgttaagtttgtccagtacaacggtaagttcaaagacaagcgtggtaaggttcatactctggtgagcattgatggtgctggtgcagaggttggtgtaggacacgctttccctaacgtttctatgcttggtgaagcaaacaacatcttcgaagtggcttatggtccatgtcctaagatgggttacgcaaatacacttggtcaggaactgtacgtattcgaatatgaaaaagaccgtgacgaaggtattgacttcgaagctcactcttacatgctgccatactgtactcgtcctcagttgctggtagatgttcgtgctgacgctaaagactaatattcttaaggagggttatgaatgtgttatacaggcgacccagccaataaccctcttgatagagtaagaatcctctgcacagacaccaataatgatgaaattcttattgaacagtctgtgctagagtggttctatctagaatctggaaaggatgaaaagaaagcagccatcaaagctcttaaatatttactctttcaagtagccaagatgggagatgagaaggttggtggtgtttatttacgtaactcttccagattcaaatctctgaaagctgtttatgacgaccttgttaaaagctctgtttcaggactaccctatgcaggtggtattaatcagtgtgacattgatatgcgtcgtcagaatccttgctctgtcaagaaatacacagaatatggtgatgctgccagatacgaaggcagagattactgcaaccgtgttaatggcgtatttattatcgagcgagatgaataatggttaaaagggttattcaccccgctagagcaaaattagtcggggctatgaagaacttgcaaacggctaatgctcaagttgggtattttcaagaacaaggtcaacatagctctggtttttcttatcctgctttaatgtatttacaagaagttattggggttccttcagcttctggtaaagtatatcgtaggttgtttgaaatcactatgatgctaaacagacagaccttgttagagcagactaagaagaatctatataagcaacttagcagtctcaacgtagacccctcagataccttagaagcatttgcaaagaatgctcaaaaggcaattaaaagaggttttggtaattctgctatcctccctcctaacgcaccttccacagtcaagaaaaaaggctttaatgcacctcttgttgagacaggtgacttaagggataaccttgcttataaaatttctactaagaagggtattaagaaatgagactcttaaacagacacagctttgtagtaaagcgtaaagtctctgaagacggttattataatgatgatggtgattgggtagcttcacaagatattgtagaggttaactgtaaaggtaatatccagccatatatcaaaggttctgtaaagaatggtacacagattgctttaccggaaggtattagactaaccgatacaagaatcctgtatactacatataaacttagaacttcagatgatgtagagtggaatgagtctgatattgttatgattgatggtcatgagtatgaagtatttatgactatggattggtcacagcaattagcccatacatcccattatgaatatatcattattagaagggataaaatgaatgcagttagaaacagcagaacttgaaaaaggtctagttagaaccttagtggatgttattggtcacagattagctcgtgataaaaataatagaccaaacgtaattagagcttacccttctgataactcaaatgacaaaggtttaaaacctgaccagccatttattaccgtatattgtcaagatgctgcaacaccttatggttgggttcttgataagtttgttgaagatgatgtagtttgttacagaattgcttttcagattcctgtattaattacggtaaatgggaaaggtgctcacagtattatgcttgagcttaaacaacgattagagatgagttcagtcagggatttaattcttgaagagacaggagctacagtgctagacactggagccatcccaaatgactacacttatctcaatacagatttcgaaaattctgcgcctcttgttgtaactcttgtaaaaaattcagtcctgaaagatgaacgcggaagtattattgagcgtgtcattgttgatggcgagttggtttatgaagaaggacaagagccaccagaatatactatccatctagatgtagactccaaaggggtaaaataaatgtggaatccaattgttaatgtagatattacattgaacaccgcaggaactacaagagaaggttttggtttgccactattcttagcttcaacagataactttgaagaaagagtgcgtggttatacttccttaactgaagttgctgaagatttcgatgagaatactgctgcatataaggctgctaaacaactttggagtcagactcctaaagtaactcagctttatattggtagatgcgctatgcagtacactgtatcaattcctgatgaggttactgagagcacggactactcaattactgtagctgtcggtgggggaatgtcacaaccattccagtacacctcacaaggtgaagatactgccgagaatgtattacaacagtttaaaacacagattgaagctgaccaatcaattaaagataaagtttcagtcaatgttactggtagcaacggttctgccacaatggtcatctccaaagctggtgacaatgatttcgtgaaggtaaccactacagcacaaactgtgtctattgcaagcacaactgctgatacagcgtcaactgctctggcagctattgaagcttattctaccgactggtatttcattgcagcagaagacagaactcaacagtttgttttggcaatggcttctgagattcaggctcgtaagaaaatcttcttcacagctaactctgatgtagcagcactgcaaggtacagaattaaatagtgcaaatgatgttccagcacagcttgctaagagtatgtatactcgcacagtttgcttgtggcatcacacagcggcagaagattatccagagatggcatatattgcttatggcgctccatacgatgcagggtcaattgcttggggtaatgctcagttgactggtgtagctgcttctttacagccagctaataagagacctctgacaagcattcagaagtcagctttagatgtacgtcactgtaactttatcgaccttgatggtggtgttccagtggttcgtagagggattacttctggtggggaatggattgatatcgtccgtggtgttgactggttagaatcagacctgaaaacttctctgagagacttgctaattaaccagaagggtggtaagattacttatgatgatactggtattacccgtattcgtcaagtcattgaaacctctctacaaagagcagtcaacagaaacttcctgtcatcttacacagttaatgttcctaaagcctctcaagttgctttggcagacaagaaagctcgtatcctgaaagatgttaccttcgcaggtatcttagcaggggctatcttggatgttgacttgaaaggtacagtggcttacgaataatagaggtaaattggaatggctatgtatcagcaatattcccctaaagacgttgtatgtagctggaatggtattgccattgaaggctttgccccagactcatttttacgtctacagagaacatcaccacttatcacaccagttgtaggtgcaggtggtcaggttgctctgacaagaaatgcagacaagacaggtactattgagattgagctaatgcagacttctctctctaaccagatgctttctgcaattcaagctaaacaagacaacatggaacttgaagaagatatctcttctaacttcgtaatctacgacccatcaggctctgttctggcaactggtattaatgcttggttgcaggaattaccacagattgaacttgggcgtgaccagaactctaaaacttggatttttggttgtgagaagctagactacacttctacaattccagcgtcaagtgtttaataaatcctataagggggagactttaaaaggtcttccccttttttgtttcttttaaaagtattaaggaatcacaatgaaaacagaatctagagtaattaatggtaagaaagtaaatattgttctgcttggggcaagagatgggattaagatgtctatgaagctgggtaaaattgttgttccaacatttgcacagatgctatcaagtctgactgataaagataagaaagaagctccaatggttccatttaaagaccttgttgaagcttgttttgacagaattgaagaaattaaccttgaagaaatggctaccctgttatttcaaggggcaactgttgatgacttcccactcaatattgatacatacttccaagcaaactacggtgagtttattgattacttagcatttgcgctggaggcaaacttcggaagttttttcgaagcaagcattttcaaaagcctaacttctcagtaaacatgggtaatactctacagacaccactaactgatgctgctgtagaggcaacctatgaagaagcagacgagatgaaatttgtgcttgctatttatggtatggaagggtgtaaagaaacacttgaccaactctttgctatgacattctctgatttattatcattgagacaatttcttgaaattcagaggtcgtataaagaggaaattgcttacaacgaacttagaagagcaggaaaaatgtaatggcacaatatacagttgatagcttcattgtggaacttggtttcagtgaaaaggttgttaagggcttgcaaagagttgagaaaatgtctatgcaagctgctcagcgtattgagcgaaatatcaataaagcctttgatgtgaaacctaataaaagttctcaggaagcacttaatagaattgtaaaaaatgctcagtctgcttcgggcagaatcaataaagcactcaacagttccttgaaccttgattcacaaggtgttaaatctcttaagaaacttgaaactcaggcaaaaaagactgcaaaaggtattaacaagtcattaagagatgctatgaaggttgacggtaaaatcactatcaagacagggagagggagaggtggacagagtatccctcctgttggtggtggagcacccagaggtccgagagtagatgttgctcagagacaaatggaaagaatgtttaacaacaacttctattcagggttaacccgtagactggaaacaatcggtggtcaaggtaaccaaatggcagcctctttcagaggaagcttgcaaaatatctataacagatataaaggtactggtaaggttggtgagtatgagatggaagttaaaaagctcatcgacgtaaccaaacgttgggttattgcagaaaatgctagactaaaatcagttaaagaatcagcttggctacaggatagagctaacgcatcattacgtcaattagttggtggatttgtttcagcttatgctttactggaactctcacaaaaaactattgaagctggtgtaaaaagacaatctgcacaattagcctctacagctatctttggagcagacactcagcaagctagaatgttcgctgcatcattcgcacaccaaattggtcagaactacacagataccatgaagcagtactcaaactttgctgctggtgctcaaccaacacttggctttcagggtactcaagagttctataagaatgctgcaatgtttgcccgtatcaggggtgctactgatgaagacttgaaaggtatcatggttgcattccagcagatggcgtcaaaaggtaaagttcaggctgaagaacttcgtggacagttaggtgaccgtttagcaggtgctgtgcagctattcgctgatgctattggtaagaccccacaagaacttgataagatgatgcaagacggtaaacttcttgctcaagacgttcttcctaaagtatctgaaagaatggctgaacttgtcaagcaagcaggtggtatgaatgctgtgtccaagcagactgctacatcaatgggtcaagcgaaggctatgtgggataacacacttgtagcactgtttaacaattctagtgagggcatttcacagttatctaactccgttgcaatgttcttgcaaggttctatgggtagcacgcaggctttaggtcttgtgattgggaacctgttaaaaggcgctagtaatctacttgacttcattacagacttcatgtacagaacatctgcactatactactatgcaagagcttggtataaagaccttgacaacagccagcaaaagcttatcaaaagtgctggtgaatttctaggaacagttgtcacaattggaggcgcagttgctgtagtatcaaaagcagtcaagctcctaagtggtttggttggtggtggtatctttggtaaaatcttacaaagacttggtgttagtgcagcaggtacagcagcagccggagaagcagccgcagcagcaggtggagttacagcaacgagaatggcacttggtactgttggttcagcattaatgctaagaggctctacagacccaaatgctgctaaaaactacagtgaagttacattaccaaaaccatttgaaaatgctgttgcaaatattacaaacccaaaaaggccaatgttctttgatgagaatggtcaacttcagtttgcacagtacactcaagacgttgaaggcaacagaaagttaattgataatggtctatctaattgggagattatcatggagaagctatcaacatctattgataattttgccaataagtttaaccagacaccaatgatgatgacaccttctggtttacctatgcagactaaacaaaccctgaatgttactttcaatcttgatggtaaacaaattgctactaagatggtggatattactgacaagaatcaagaagacattcttctaagttcaagctatccagaggaagaataatgttatgggattctaatatgcaaatcaaatatagtggcaaagacggcatctatttccacttaagagataatgtagatgccttcttaaccttatcagcaactgaaaatatggaatttgacagccctatgcaggtaactacacagaacatgcaatcagggcaaaccgtcacagataatgtgcaaagagcacccagaacaatcactattagtggtgtcgttgtagttggctatgaaggaagcttattattaactcgtcagggtcaattagtagaaaacttcatcgacactcttgaaagctggcgtgaccagaagcaaattatttcagtcatctgtaaagacggaattaaaattgatgattccattatcacaagttttaaagcctctaaagatgttggtatttcaaatggtctaagaatccagctaacttttcaggaaattaactttaaagctatcgtgggacaaactgatatttctgctgcaactggaaagaccgctaccacgaatgatggtggtgctaccagtaaaaagaatacagggaataccacaacaagtctaggtaatgggaaattaaactgtcagttattattcgaccttgatgccaatggagtaagggaacttactagtgctgaagataatgcccttgcaaaatgttccatgtctgcaaaaaccagaaaaggtgttactacattcagtgaagaggctgagaaaaatgccggagcagcattaaacagaactgctggagatggaaaagcattacaaaagcattcagtgaatccgaataaaaaggggacttattaatgtcacaatatattcctgttcctgatacaggatggtctacacaaactgtaactctggatggcactgtctttgtaattgaattaaagtataaagagaggcttgacagatggttcttgacgctatctgatgttgatggtaatgtattattatctgaaaagaaatgccttgcagaccaatcaatcacaggacgctatgtaattccttcattagctggagagctttttgttgaacgaatgtatggtactgatttacagcctaccagaaataacttcggaagagaaaaggcatttgagcttaattattacactcaagaagatatgagattaatggagaacttgtaatgtctgtaaaagatagcactgctggggcttcttttaggtgctatcaattggctgtaggtagtgaaactacagcctttaatgataaacctacaagccatgctaaagattctatgcaaatggactattttgacaacttacaatttacttgtaatgtgtcttatacgtctcagaagaataaagtaacctctgatgataccacttttgaaatctacaaccttaataaagagatgagagccaaattcaaaaccgttggtgcaacagttatgcttagagcaggttacactactggttttaaaagggacgcaaatggcgaccttattattgaatatgataacctcccattaatctatctaggcactattgaatatgcttatacatataagcgtggtgttgatatgattacaaaggttatctgttccaatgataaaatggaaagaaccacgattaagacatcaatttcttataaagcagggacaacgcgtaaaagtgtgattagagatttagtcaacagactaggtttctcacttattgatgaagacctttcaagtattgatagttacacttacaagaatggttttagtgtttggggaagtgttgcagaggcacttacaaaggtttgtgaagaaagtagtctacgttggtatacatttaacaagcaaatccgagtagttccttttaacgctaaggctagacaactttcttgggaaatttacccatataacgttattgattctttgcaaggctactacagaagaactagaaaggttctgaaaaaagagaataagacagttattaaagttaaaactggagttcgttgcaaaatccatttagatgggagaattaagatgggtgataacatcactattagggaaagtgaagattttgaaggtcagtatcgagtaaaaggtctttctcacaatcttgactttactggtggtgcttggacaactgaactagatttagagaaggtggaataatgaagtcaccagttactagaatgtctgggtatgtttcagaatgtcttgatgaatttagaaaagaactgtatactggattaccagccattattcagtctttcgattcaaagactcaaacagccactgttaagccactttactctattaacggtttacctatgccagagattactggtgtacctgttcaatttccaagtggtggtggggcatctttaacattccccgtaaaaactaatgacagatgctggttagctttctcaatgttacctttagatgacttcgttgtcaatgacaagaatgttcagatggaaacaaacatgagaaggacacatgatatttcagactgtgtagctttcgtaggcatctgcacaagaacacagaattttaaaccagacccaacagcagttagacttcatttcggtgactctgtgttaagagttactgatgatggtaacttctactttgaaggtgatgtacacatttctaaaaacttgtacgtaacagaagaagtacacggctcagattttatcagtgacacgactggtgtgagctttaatgaacacacgcaccattattactggacagaccctgctggtgaggctgatactacagaggcacaataatgaaaacagactttgcattaaatctaggtggtgactatgttgccactttaggttcagattcagtgtatgtggctcatggagatttaaagattactggtaaccaaattagaattatcccagaagatgataaagctactcaggttgctcaaagacttcatattagatgccttttaagggctggtgaagttttctttaatacatctgctgggttcccatatttacaacttgccaaatttaaacagaaaacttctatctttgataattacatgaaagcctaccttgttgaaacaagagatgtatctaacatctataactattcttcttcaatggataatgctcagagaaaagtaactgttaattttgatgcaactactacaacagatattttaacagacattacgcaagaggttaatatctaatggcaggattaactacaacaggattacaaactctaagatatcaggaaatttttgataatatcaaatcaaggcttcttagagatatttcaccaaaccttgacgtttctgaggatagtcagttaggtctctttctagcttcaattgcaaggtctttagcagacactcatgaaattctatcagaaatctatgatggtggaacgattgataaagctgaaggttttaaccttgatgatattacagctttaaacgctgtgtatagatatgttgctcaagctacaaggggtcaagtagagtttactggaacaacaggtgcaacaattccgtctacaaccagattaagaagtactgctgggaatatcttctatccagtttcaaacattacattaaccccttcatactgtgttgaggctattcttgaagttaactctttacgaactgatgcaaattatgttattattattgataacgttattttctcttatcagccaaaatcttcagacacaatcacagtactattaactgagcttgctaatgcaattaatggtggtattgtagcaaaagctgaagtcatcaatgatggttcagcattacgagtttataaagatgaaggcgacattattgcaagaaccaaccctatggtagtgactgctaccacattcctcacattcacaaaaattacaactatccatgatgttgttgctgaggaagttggtgcaattcctgcattagctgggacacttatcgaaattgaaacaactgtagatggtcttgatagcgtatataaccgttatggcctgacaacaggtagaaatgaagagaccgatacagaacttcgtcagagatatttagaatccctgtcagttactggtgtaggtactctggatgcaatcgtagctgctgttaagagggttcagggcgtatcagatgcttcaggtgttgaaaatgatactgaagagacaagctcagaaggactcccaccaaaatctttcaagattgttgtagttggtggtcaaaatgataatgttgctcaagcaatctgggacactaaacctgctggtattagagcttatggggctatctttgggacagcttatgacttaggtggactatctcataatatttacttcagtaggccaacacctaagtatgcttttgtaaaagtatcatactctctatataatgaagaaagcttgacaattccagaagaagatatcagagacagtattattcaaggtattaacgcttatggtagaactttgaaagttggtaatgatgttatccctaatagaatctatgggtatatttataatgtcattaaaggtatcgagattaatgaaatcaaagtagcactatccaatagccagtcagtaccacctagtgatggacagtacactacagcaagaattactgttgatggtgaccaatacactgtatgggaaagtagcaagtacaccattactaaggagtgataatgtttcagaaaattgatgatgtttattacaagactcttgatgaaaggactgttacacagtttaaagagaaattcatctatacgagtttgctgaaagctatcactgatgagctacaaacattggaagatgtttcatggcagatgcacactgaaaggaatatcaggaaggctattggacagcaacttgacaacatcggtgcattaattaaagtaccacgaccacttggtgctgatgatgaaacatatagagcaattctttatattcagatttttctaagacgttctgatacaaccccaacatttttacagaatgctatcatgactctgtatgatgcaacattttcacagctttttgaacatattacacctatgactgctggtattgtggttagagttaacacaagaaataacgttgttgacacagcatacacattagcaaaaattgctgcaacaactattggttcagcagtcattctaagagatgtaaccctgaatggtactgcttggacacctgtagaggttgctgactctgctttagcaattgttgatgataaagataactggcttgttacagatgctaacaagggtctggttaccaacaatacaggaggttctttagagaagaacttactagggagtttagcagatgctggtgtaagagatgcttatttcaagattgatagaacggctaatagtggctcagtagattacttgaaggttaataaaaattataatgctacagacaactacatcgttggtaaagaaactgtagcaggtggtgattatggtgttatggctgaagtagctcaaatcatcaaaggtagaaaagataaatcacagcaagaaggaagttcttaatggcatttttaaattggtctacagatgaagtagatgctgatggtaaccagctaaaagtattaccaccaccagaaattcaggcgactggtttattaagaggtgaaccaatgggtcgccaatggtttaattatatcttaaactatctcctgaagaaagcaaatggtactgttggtgaggtaaggtcttttgccactgcgcaaccagatttggtggctaatggctggaagcttattaagaccgaaacaggtactgcatcaacaagtacaaaaaatctttatacttatgaatttgtaggagcttaataatggcagtaggtgaaattcaaattagtgccttgcctcaagcatccttaccaattgaccttagtgatatcttccatcttaagcagggtattgaggataagaggtgtactcttgagcaattacttgctccacacgcaagcctaagaaataaccctcatggtgttactaaaacacaaattggtttagataatgttattaatgctcttcagttagtcgctgcaaataacttatcagatattgttaatgtagctgaggcaagagcaaatctacagattatgtcttcagaagaggttaataaccttgtccagcaacatatcaaggacaagagtaacccacacaatacaactaaggcacaggttggtttaagtaatgttcagaactggacaacatctaatctgtataacgaagatgcagataagtatgctacagcaagagcagtaaataacttgtacaaggctgttcaggcttcttatccagtaggtactatccatctttctatgaactctgcaaacccttccacatacttaatttgtggaggtacttgggagttagtttcaaaaggcagggcattggttggctatgactctgatacaagaccagcaggttctgtatttggcgcttcaactgtcactttgtcagttaataacatgcctcagcactcccactctgtgtctcttagcggtggtggtcacactcataatgcaactgtgtcaatttcagcttttgattatgggactaagactacaaactcttttgactatgggacaaaagctactaacacaactggtaaccatacacacagtgtgtcaggtaacactagcaccaatggtactcacaaccatgatgtgtatcctagagaaaatgatggcactggtaatgctgtggctgactctgatggtggtggtgcaagaaggacatcaaggacttctagtgatggtgcgcactcacacagctttaacgtcacatctggtgcatcaggtgaccacagccacacggttggtattggtgctcacagtcatacagttggtattggttcacatacgcatagtggcactgtaacagtttcttcttctgaacatacacatagtggcaatacaaatagtgttggtggaggtcaggcagttaatattgaacagccatccttcgtactgtatgtatggcagagaacagcttaatttctttacaggggctttatagccccttttaagaggaaaatttataatggcagattacaaattgagtgagctaaactcaatcgacacaatccgttcagatgaccttcttcatgtcagagttaaaaagagacctaaaatgctgggtgatgaagaccgtcgaatgacctatcaagatttcttagcatcttttaagcttgaaagatttgttcagattgctggtagcactatgacgggtgacttaggaattgttaagctactttacggtggcaaggctgtattcgaccccacaggctcttctgagattactgttggtgatgttttaaagacttttaaaatcaacgcaaacggccttaaactaactattgcagacgcttcaaggtcggcaactgtttatcatactttgaataagccaagccctaatgaacttgggatgagaactaatgaagagaatgacgcaaggtatgcaagactagccgtgaataatacctttagaggtactcaagctatcctctctgacaatgaagcgctcattattaaaaatatcactcaaggtgctccactctatcttcgtggtcaagatgcagatggtactaacagatggtatctaggtaatgataataggggtacaaataatcttgtattgaagaatgtaaagtctgacgtttcaattgctattttagagaatttggtgacagtcaacaaaacagtcagaatcactggacaggtgcaaccttctgattggactaatattgattctcgatacattccagcagctactttgagtaatcttgctaaactaagtgatgtaaacactttcaggtctgcacagattattaatcaaaatggcttattgttacagctaaagaatactacacaagatagccagttatactttgctggctttaatgctgataatgttagaaggtggtacatcggtaacggggaacaaaaaccagaaagtttcgttatccacaatgataggactgctactaccattttcatggtgaatgacttcttactgaacaaaacagtcagaatcactggacaggtgcaaccttctgacttctctaacttagatgctagatactatacccaatctgccgcaaacgcaagatatatgcttgcaagcatcactggttcggcttctgaagcagatggtggtgatggtgttgcatgggatgcaaaaacaggtctttataaggttactaacaccactggacagtcttcttcacttgtatatcacatgtttttagggactggttctacaccatctgcacaattaaagttttcgtttaaaaatggtgggatgtggtatagaacatcaagagatgcctatggcttcgaagttaattggtctaaagtttacacggaagcacaaaaaccaaccccttcagagattggtgcatacactaaagctgaaactgaccagaaaattgcaacagcaattagtgactctacagaccttaataaaatctatccagtaggtattgtaacgtggtttaacagtaatgttgaccctaatacagcacttcctgggttaacttggacgtacctgaacaatggtgttggtagaactatcagaattgcagcagcaaacggttcagatgttgctacaactggtggttcagattctgtgacgttgtctgttggtaacttgccatcacacactcatagtttctctgctaccacttcatcttttgattatggtacgaagggaactaacagtactggtggtcattctcactctgtaagtggtacaacaagtgctgctggcaaccacgctcaccacttaggtctgttattagttaatggtggtgatgctcagtatggttacacaactgttagcaacagcaagacaagaactcttgactggcttgatagaagagataacaagttccctaacactaacacaactggtaaccatacacacacgtggtctggtactacaagcggtgctggtgaccattcccactctgtaggtattggtgctcatagccacacagttagtggtaacactggtagcacaggttctggttcggcatttagtgttactaaccagttctacaagttaatggcttgggtaagaactgcttaatcccttgtatggctaacgtaattaaaaccgttttgacttaccagttagatggctccaatcgtgattttaatatcccgtttgagtatctagcccgtaagttcgtagtggtaactcttattggtgtagaccgaaaggtccttacgattaatacagactatcgctttgctacacgtactactatctctctgacaaaggcttggggtccagccgatggctacacgaccatcgagttacgtcgagtaacctccactaccgaccgattggttgactttacggatggttcaatcctccgcgcgtatgaccttaacgtcgctcagattcaaacgatgcacgtagcggaagaggcccgtgacctcactacggatactatcggtgtcaataacgatggtcacttggatgctcgtggtcgtcgaattgtgaacctagcgaacgccgtggatgaccgcgatgctgttccgtttggtcaactaaagaccatgaaccagaactcatggcaagcacgtaatgaagccttacagttccgtaatgaggctgagactttcagaaaccaagcggagggctttaagaacgagtccagtaccaacgctacgaacacaaagcagtggcgcgatgagaccaagggtttccgagacgaagccaagcggttcaagaatacggctggtcaatacgctacatctgctgggaactctgcttccgctgcgcatcaatctgaggtaaacgctgagaactctgccacagcatccgctaactctgctcatttggcagaacagcaagcagaccgtgcggaacgtgaggcagacaagctggaaaattacaatggattggctggtgcaattgataaggtagatggaaccaatgtgtactggaaaggaaatattcacgctaacgggcgcctttacatgaccacaaacggttttgactgtggccagtatcaacagttctttggtggtgtcactaatcgttactctgtcatggagtggggagatgagaacggatggctgatgtatgttcaacgtagagagtggacaacagcgataggcggtaacatccagttagtagtaaacggacagatcatcacccaaggtggagccatgaccggtcagctaaaattgcagaatgggcatgttcttcaattagagtccgcatccgacaaggcgcactatattctatctaaagatggtaacaggaataactggtacattggtagagggtcagataacaacaatgactgtaccttccactcctatgtacatggtacgaccttaacactcaagcaggactatgcagtagttaacaaacacttccacgtaggtcaggccgttgtggccactgatggtaatattcaaggtactaagtggggaggtaaatggctggatgcttacctacgtgacagcttcgttgcgaagtccaaggcgtggactcaggtgtggtctggtagtgctggcggtggggtaagtgtgactgtttcacaggatctccgcttccgcaatatctggattaagtgtgccaacaactcttggaacttcttccgtactggccccgatggaatctacttcatagcctctgatggtggatggttacgattccaaatacactccaacggtctcggattcaagaatattgcagacagtcgttcagtacctaatgcaatcatggtggagaacgagtaatgactgattgttaagatggtgttaatattctttatgggtattctcaccatcttggctgatgaggtgattaaatgcctacaatcctagcaattcttctaaaaaatctaggtagcttcttctggaaactcattttatcccttctaagtgaatacatgattgagaaagtgttctttaagcttgcaagataccttgcgagtaaaacagacacacctattgatgatgagttcgtagataacttagaaaaagcttttaagggggagaaataaatgaagtggctagaggaagcttttaaaaataatattggtgcaattgtagttggtatttttagtgttattgggatgtttaccacgatgcaggtttcaagtggtaaacaagaagtgtctgtcacaacaaagttacagcagctagataattattccaaaagtaactattcagctattcgtgatttacagtctgacatgagactgattcagctagggatggagaaccagaaagttcagttagagaacgttaagggtgagaatgcaaaacttaccaaaactcttgataaattctctgacagtgtgaataatctggctcaatcagtatcagccttgcaagctattactgaaaagaacacaaagaatactgaaaaataaagtttaaggctcctttttacgggagccttttttgttttacttgcctactgacagaggtgcttcaatcttccctgcatgttggtagttgttaattccaccaataaagtcacttgcagtaagatgttttaagtcacttaaagtgttaagctgtacaccaatctcaaaagtaggtgcatggaactcttcattgttcatcagttcataaacctgcttcatatggttctgataaatctgagtatctccaaagacacctatcaagtaccgtggagtgtatccagtcatcttacaaagaacttccagaataaaaccataagacgcaatattaaatggaagccctaaaaaggtgtctacagaacgctgataccattgcaagtcaacttcaccttcgttggtgatataaatctgaaacagaacatgacaaggtgctaaagccattgagtttgctgcaatatctgctgcattccaagcattaacaagcatgtaacggtctgtgatatcacctttcatcttcgttactaaggtttctaactggtctacaacacaaccattatgaccttcaaagcttctccactgaaccccgtagattctcccacctgcatcttctaaccagtcttgctcagaagaatagttagagcttaaccaacgtttaaaatcatctgaccagatagtccaacgttctccatcattttcaccccaagtgcgataacggagttcaccaagtttattctcaccattcaggaaccataaagcttccccaatgacttgccgtgtaaacacctgtttagatgttaagagcgggaaaccagttcgcatatcaaaacgaaactgaggtggagcaaatgcagagataacatctccagttcgtgtagtacgcagttcaccaacggataaaacatggttcaggatatttttgtaacttgaatctgcttgtgacatatcaaaagtgtccttttacttgtggaacataaatttcaaaagttgctttaccatcctctgatggttttgactgtacctttgtaaatacacggttatcatacagcttctcaaagaagttttcaaaaggtaaatgcacagtggcctcttcagtaactttatggaagactgtatggaacaccacaccagcatacggtaaagcattgacaaggacacctgcaccaccaattacaaagacatcttcatcaatagagctatcaagatacttcaaaaatgctccaaatgactctttactggctttagcatacattacatcatctttgccaaagtctatgcctaagtatggtacagaatttgttaagattaggcttgcacgttctggtagaggtttactacccagagtcttaaaagtctcattacccatgactactaagttatttttagtgagtctcttaaactcttgcatgtcctgtttatgtcgaggccacggcataccagttggagtaccaaactcaccattttcaccacttgcaaagattaatttaatcattttgtaaatcctttcttaatgaaccagttgataacactcttcacaactttactacgatggtagataaaatgtggagagggttggtatgaaccataagcccagaaagcgataatttcattacaccctgtgcatcgggtactttcttcagcaatatgaccgttgactatttcacttacctcaccttgtaagtctgtacacccgcaatgtggacaacggataggtgttccatcagactcatagcagtgttcaattttcatctatttaacctcaaaaactggttcaagaaccaatataaagtctacacagtcatcttcttcatccagaataccatcaaagttcttaggtacaaagtcgaagaggctcatagaatatcggtcagaagtaaccctgatagtgttccctatattctctacagttaatattgtacggctttctgttacctcacttagaagattactcacaaagtcatctaagaagtgtttcatcagtgacttgaagcctttagggtaatctgtaccagagtatgtttcaatctgaggaacaagcttaacatttatactagtctttgttaagaacgttttagagaacatgctatcaggtagcttacaaacagtctttccagtaccttcatgttcaatctcaacaaaaccagcttcatcgccacatgtaactattttaaaagatgcttcattctcatactgtgaagccataaactttttaagcatcgttttaaggaaatctgcatgggcatcttgtaagaatatatcaatcatagttaatcacctattatgggaacagacacttgatgtcatcgtttttgaaaacaaaacttgtgtagttatgaccatcaacatccagccaaacagcctgaacatctacaccatcaagattgtggtaaagctctttgatgaagtggtctttcacaatctgactgctagttgtttccagcttaatgttcgagattgctgaacctacagccatatagcccatgacacgtttcttctcagtatgcttaatcttaccatctttgtaagccataatgagattggagagaatcttcacaccataatatttttcaaggtgagtaggtacgccataaaagcctaatgcgaagttttcagagtggataatgttttcacgtttcatattaatctgccaaccttaaattgaaattaacaccaaatttttcacatacttccaacatatactcaagggagacgttaccagtgagatggattatgttggatacacgagcctgagagataccacaaattttagcaacttgctcttgagaaagacctctggatttaatctctctcttaaaacgatgtgcaacgaagtctctcatttcgtctacatccattggacaaatataactctccatttcagcctctctatcagcctcccaatcatcttgtggggcataagggtcaaaaacctcattcatctttcttcttccgtttgcgtgaagtgtcaattaatgagtctatgtttgtagccctaaccttttcacgttcatcgttaagataatcgtcaagagccttttcaatctgtgaatcatcttgacagataactgtaaagactgtaaagccgtctgtatcgtcaattatcttaccataaccgcttctgggatgtaactttttaagagccatatcaaatacctgtgcagcttctgttttctaagaaatactcaacaccatacatagctttttgcatcaaatcttctttaaactggatacgatgattgagcatagcctgtacatcaatatcatcagggtgcttctctttaatatttgcagattgcaggaaatactctgcaagaacacgatactgatagtcagttaccttatcagtcatctctgttaaagactcttcagagattggtttaagtagttcacctttagatagggcaacacctttaacaatctgacaagtgtcttctggaacacctgataagtccacatttggaagttctgttgcattgactggtaaattcattgccataaccattgcagcagctaataaaatctttttcataatgacctcaaagttatattgaattttgtattacatttagtataaaaataagctataacacctgacttgtcaacagattttatagcttattttggcagattttttataaggctactgccatccttccataccttaccttaccacacctaaccatacctaaccaaactacaccatacaataccttgttaaaagaccctcttaaagaccttttaaaaaggagcctccgaagaggctacctagtcaacttagaaaggttttctgcgttgcttgttaatgttagctttcatagcagctaagtggttttgctgttcaattagtcgtgaacgttcttggtggctaagtgccatagtgttcacattctcaattgcttgagtagcttgctttaaagcacgaccaattttaccagacattttacgttttgcaatagttgcttgatgcttaggttcaaccacacgataaccaacacccattgaagcaaccagataaatcttctcttctttaagaagcttctcaataaacttctcaagtcggtttagacgtgtaagagcataagccttcatttcatcttcgtacttaacaatgtcaccttgataagttggcttcacaatacctaagaaggtgtccatctcagagtgtgatacagtgtcaccataactaaactttgctgctaatgcttttgtattcataattaaacgttaccttctgaaataacttctacagaaaaacgaccaaagcgtggacgccaatcacctacaccacaaaggttgccagcattttccagaaccatcaggagttcttctttggtgatttgctcttcatcgaacatcaaaccaaactctacagaccagtcacggaagattggacggtagctcataactcgtgctgtgccaatcttaacagatttagcatagataaagtctggattcttagcaagttcttgtgggtttgctgggcagttcttgatagtcattgggaagactacatctgtcagcataatggctcggtcaatcaccttaccaagtttgttgagttttgcaccagacttgatacaagcctcaatcatctcaccgttcataacaaaacctagctgctcatcgtagtaacaagaggttaccagttgactttctgctaagagcgcatagtcttcgtcagtctttttacgtttactagacagagacttgtgatattttgtcagagggtttaatgggtctgacagtgtatcagcgtggctcaggaaagggcgagtaccagtgattttgatatttaacagtttcatagcatttagctccacactttagttgattgttaagttgtttgtaaagaaccctcaacagaagactctttagaaacttggtagatttttaacgtggctactaccatccacccataccttacctaaccaaaccgaacctcacacaaccagaccgagccgcaccccgccttattaaaagaccctcttcaaagaccttttaaaaaggtaagtctcattttaatgtagctgagactaactacccatactgtaccgcacctgacccgacctgaccagaccagacctaacattaccgtgccacaccgtaccgaacagaacactgccatacctcacatcacttaaaaaccctcttagaagactcttaagtgatgctggtgagtacccgttggtttatgctgctcagtatactcaccaaattttctatgtcaacaactttttatataaaagtcctgatagctatatgtgttacaaaacagaagattgtgaacaaaacacccattgcaaaagatgtgtccaaaagcttacttgcaatgtatgacaatacaaagacaaccagtataaacagaatgactgcactgaacatagtttactcataatccctaatagctagcccgacagggaactgtaaagaacccttacgagtcatcttctggaactgaaccgttaaaggcttcccgataaactcttcaggatgctcagcaagatactgtttcttctcatgagtagtcttccatgagacatctacaaagacgttaggaagagtctctacaacgaacttgccatgaccacgcttatcagtctttacaccagtcactttaaactcttcagtgtgcatcttcttgtgcttaatcaagaagtatgaacggtgacaacactcatagaaggagtcttcagagattgaacggtacattgcaccttcaaacttagcttcaacccacttatcgtgagcttcatcaaactcttcccaagaatttacacgacgagacttaacaggaacaactttacagccgtctctaaagtcattcaatggtgaagtctcaataatatctctacgctcaggccacgtcttagtactgtcacagatatcgtaccagtaaaacttgagcaagtgtctgtcaggattgtcttcatttttaatcatggagacgatatcttctaagtcccacccatgagcataaatctctccatcaaattcatcaacatctttgtggagccttaacattgccataatgtcaggtattagttcagtagggattttgtaaacagtattctcacgagaatatgctgtaaatacactgccaatactcaagtgccttgaaatcctacaacggacaccatcaagtttcggttgagcatcagcagggaacttcagatactttgcatggctaacctttgcagcatcatgagcaagctgtacacctaccttctcagtattctgtgcagaatcttttgtgtaagcataacctttgcggtcaacttgctttttatacttagcagcaacttcaaagagagcttgctgttcagcattacgctcattctttttaccgatgttcttaggctctgctgtgtactcttcaaacatcatcttgccattttctttaccataggttgtgataactttgtcacctacagcaacacatgaccagacgttgaaggaaccatctttattttgtttgtacagaattgtcatttttaacctctgagtgataccaagtgttgcaggcattacatgcgtaaagctctaagtcgtttttatctggtttatggaaacagtttgacccacaacgacaccggaataacttaccatcaacacgaagaatgaatgtttcaagctcaccatcttctgtaagaactgcgttctgaaatttattatctttacccatttgtactctcgcctgtgtcagattttatataagacctctcactacgtcttttaatgaaatgtacaacgcattttggtgtattttttacatctttaatgtgcaacctttcgaaactgtgtactgtgaagattgcatctgtcattgtttgcttagatttcattttctcttaccaccaatttccacgtcgataacttgaacatcaccagcaacatcaaacttatgaatgatgctttccacagtgtaagtccaaccctcaatgcgaaccaattcaccttctcgcggtacgattgggttacgttgggccacggttgcagtggaataaacaacatcgtagcagtagatatagtgtactaaaacttgcatattagtctcatccatcaataacagtagtgtgtgattgaccatttttgccatatctataagatgttgttgtttgagagtttgggcatctgacaacaacaatatccctgcttatagcatccccattgagtttgtagattttgcagtcttgcatctctggagggaggctgtaagaggcatctttgttttcataagatgggttacagccagccagaaaaattactccaagtgcaaccattgctttcacacaactcttaaccttattgttcacgataatctacctctctgtatgtttttaaatagtgagtgatgagttctggtaattcactacgtttaacgtttgaacgaagaagtgtccagtcaaaacctttaccaaccctcccccagagactgtacattttcttcatagcaactccagaatatcaatacgttcacctttgagtactccagtacggtcttttgcaatcttcccttcaacaataagaatgtgtgcagaccttaaagtgtcactgttaaaggcttttacgaacttgctaggcatcactacaatacacatctcctgaatcaactctggagtatagcagttgtcgtgaagttgctgaataacgtctgcaagtgtcatttttgatgcctccaatactcaatatcaataagttcttgtgcaatgcttttaaggttacctttcaagaaaaccttctcagaacctgaaagagatgaattgtcaattaacctgttcatcctctcaaacaacttctgcttacgattcttgatagtctcttttgaagcacctttcatcatcgctgcatgggttcttccacggtggctcataagccctcctatataagatatagtataaggtactcttccatgagcaccttgtcaacttagttttgcaaactctccgtggagtttaatagcagcttcacagtaagctttatgggcttcttcaggtgtgtcaaacataccaagatgatagtttttaccttgtaaacgtatcattgctcgaaaccttttacttatcttctgtacaccttttggcaacccagatggggactctcttgaccgattgcaagagttttgtgaagctgtacaaacccttaaattcaagtacctattgtcccaaccgtctccattcttatggtcaacctgtaaggttttatcaggtagatatccatccatatacaagataactaaacgatttgcttggtaaccccttccatcaatcagcaactgaactgacttgtgtccatcagtatttgttctgtagtttccagccctcttacctccaaatctagagttaaagtttgcattaccttctctaaacttccaagtaaagacccctgtttcggggtcgtagtccaatagctccttaagacgaatttctgtaatcatttcaacaccatcaatgtacttccaaccagctcttaccaaccttgcctgtgccagttacaagcgtctcactcttcaaacctaaattcttagatgcctgaccatacatccagtcagttatggctttaacttcttgagtcatactttctgggcattcccaactgttttcatcgtggtatgccagcaaaagcctagcaccaattgctggttttcgtccatttaattttgtcaacccttcttcacatgctcttctacaagcaaggttaattgcctcattttgaatctgagcctctgaacccatgagcaaataattcaacagcttatgcggagatttacaccacaaccaagctccagcaacctttacaaaaccccctttagagattgcagcagtcttaccaaacacctcttcaagtgcctttttagttgctttgtagtcagcttccaagtcatctagcagctttttaattttaggcaaacgaataaagtaagtctgtttagtcagcgcaccttcctgagtagttgcagctttaatcgtcttagcaaacttctcatcacctgcaccgaacagcagtgcatagataccattcttagctttcttacgacccttgctaatctcatgaagaagattctcatcctgagtagctcgacaagtcaagatgtcctgctcatcgttcaagttaaagtaaatactgttcagtgtatgtgcatcagtccctgaatagacaacgtacaggtcattctcagagtcatagcgaaggtacttatcaatctctgggttgaggtactcatcaaagtgtttacagtaatagcgtccatcttcttgacgaatgaactcaatttcttctttaccttgcgttaccgctttggtgaagtctttatcacccataaagttacaaagaagaactagctgggctgagttcatgtctacagagacaacgttagtaccttcctcacaaatccacactgccctcattggttccccatagacagcagcaccagacggtacgtttacaataccatactgtgtcatacgtccagttgaagtaccaaacaccattgcaccagcactaaggcgaccatcaggacgaatctggttcaaccaacctttttcatcatcctttgagttctcaatagttctgcgtcggtgcatcaaagtgtagtatttagcaatcttctgtccaagctcaccttcaatcgtatcgtaagatgattcagtaagttttggtgaagtacggattaagcaaggctcaagcaaatctgtgtacttcttcacagaccagttatgctcaatgtactggacgccttcgtgttcaacataactcaaaccacaccgctcaaccatttcctgccacttaggatgctttgtaatcatctttttattgtctttgaaacgacaaactttgacagggcgaccatcagagtctttcttgtagttccagtcatctggaatccaaccaactgatttcaagtagtctttaacaactgctacctgagtcatacgagaaacttcaaactcaattggtgtatatggtgcatcaatcaaacctgtatagcgacttgactcaagttcaaagtggttaacaacatgactgttgtagtacttcacagttttgactgtttttactggcttccagtctttgcatttcttaccaatctttgcattcaactcgttgcaaattgcacgagcatccttcattgctacaaaaccttccttgtactcttcaccagttacagagttggttggtgtatagcaatttctcttttcaatgttaaaaatctttgtagttggcttaccaaatggcttgatttcatatgtctgcatctcaccgttacgtacctgctgacggtactttgtcttagggtacttggtaattctcttcagtccatctgcatgaccaaatgtttcaacatactcattccaagcttttgcaaactcttctccagtgactttacctttggtcttaatagttggaggtagatgcggttcaacctctgaagcaagctcattagtcaacttgtcaagttcctttacatggaactccataagctctttatcagctttccaaccattgatagcttgttgactcatccagaaagatgtttctttagctcgcatgtaggtttcataagtgtctatgccacacttcttaagcttgagatactcattatcaagtgcccgtttagttttggcgttaatacggatatcttctacaacacgagtgaagatttctgcattccacacaccccaatgttcaatctctggtttacgaacaccaacacgagcaccccatgcagccaagccatgagcacctttataaccctttggagttggtctatccatccactgaacacgagactggataagagaatcctgaaagaaattactccacggcttacactttggattatcaaagttccataaatccggtgcaatgtgattgaaaacccaccagtcataacctagaccattatgaatgcaaagacgttttgcctttaacgcaaactcaataccttcacgtaagccacccttaatgtacttggtatacttgtgaccgaggataggttcatctgtaaagacccatacaggaggctcttcatcatcagatttatagtctgcaaaagccattacgtgaactttagtgaactcaaggagtaaaccatcagtttctgtatcaccaaccaaatgtaagtttttaaaatctacgttttccatttttactccctctaaaatcattaacctcatacattactgcaaaaaattataaaaagcaagttgacaatgcacttgacaaggtgttaatctttgcgaagtgggtttttacttaaaaggttacttaacagtttaactatacagatactttaaaagtcttaaaagattatttaatagcttttaaaaagctttaaagtataacgtatagaatacgttaagataaaagattaaaacttaatagttacttaaaagaggcttacatgcagaaaatgtttgttcacccagacatagctgactttgttagagctttgcaaaagttggaagaacttgacattgctgctcaacgggaatatgctcaccatcacaggagaatggttgatatacaacatgaaatagagttgtctgaaaactatgaagatgacttaaaatgctctgtatttgagcatatgaaagatgttgctacagcgagacgtaaagctaaagacacagttgctttactagattctcttaaaaagaggttgcaaagtggtacagacctgtgtaatctagcgtcactgattaacgatgttgaaacttcttgggataggcactattatccacgttctgaaaagacacttgacttttcttcatccgaaaacttaaaatgttctagaaagaaacttaaccaactgagagagaaataatatgaatatcgatgtagaaaagatgcttgaagagaaaggtattgacgaagcatttttaatcaatgccgtagaaagcatggctatgattcttcgtggtaacaactacacagaacagtttatgcctgcaagctataacttgcctgaagacaagtctgataacggtgcttttgcagaacaggttaacatgatgctttgcgacaaaacacttgctttagcatctatcgttgtaggtgttgatgcccttgcagagttcattttttatgagatgcagaaaaatgattatattgccatgaccactgaagaaaaagacttgctactactcgcaggtaacgatgaactaattgacctgttaatttcatcaactagtgctgttatggctgctcttgagaagcgcatggaagaaaaactttcacgatatgaaaaacttgattggggtgtagaagaattaaacccacgaatcaaagaaattatccagcaaactaaagagtctttggaagaagctgttgaaaatgactctgtagctgatatagaacctcttcaggtgaaagttgcactgatgattccagctatctctacgatgatgaatatcgttgcactaatccaactttcacagatgatgggtgtaagtattgagttcattgaagagatgactggtggcgttagtatgcaagcaatcaatgatgttttggtgaacattggtgcttcaatcattgaagagaaactacgcattaacttcggtgatgattttgtgaagcaaatctcagctatggctgaaaaagagtatgctgagcaactgcactaagtctttataaatcttacaagcctccttagttgggggctttttagtaattaatggagataaaatgagtaatattatcgcatttactggaaaggcacgttctggaaaagacacctcatgttctattgtgaagaacatcttagaggatgagcacggctacaatgttgctgtaatggcctttgcagacaaccttaaactgtctgcatcaaagatatttgacctgacttggaatgacctgtatggtgaaactaaagagactccacaggtatttgacttgtcatatcctgaactgatgtttaaagttacggaagctatggagttcaccttcagagatgaacgttaccatatggacttcaagcttatgtcagagttaaccggacgattaatcatggagcttaagaaggttgctaaaccaactctattgacacgtctggggtttagcaaaaagtataaattctcatcaagacaaattcaacagatttggggcactgaagttgtccgtaaagtaatgggagacaagttctggtctaaagaccttgaaaaaagaatggttagattctatgaaagttgctcacttagaaatcaatatggttttgtcttaatcagtgatttaagatttgactctgaagctgagtggctgagtagatttgcacaccaaactattgaagtaaaaagagacaatgtggataagatttcatcacacgtttcagaaaatgggctatccaccaaatatgagcgtgacattattcataataatggtactcttacagaccttgagaacaagctaagagccatcattaaagtttaaaagagagaatgaagatgagagtaaaagacaattttaaagttattgaccaccgtttagtggaactctcatctctttccaatgaggtaatgattgaacgtcttaagagagttgaatcacgaaggaaagagattgcagatgaaattcatgaactggacaagattgaaaatggattgaaggcagaactacaacgaagaggtgctaatgtctaaaggtcgtaaattgaaagaggctggtcagtttgttggtcattgtgcatgtccacgttgtggttcatcagatgctggttcaatctatcatcatgacgatgattcttattcgatgacttgctttagttgtaacaaaggtttcccagagtgggattttgataaaggacaaatcgtgagcacttattctactggttcagacaataaaaaccgtactttccgtgggatggatttagacgatgtaaaagacaaccttgaagcaatggacttaaaggacaggaagattcctgcaaaagttcttgagcgtttgggtatcaaggttgacattgatagtgacggtgaaattgatgcgcatttctacccaacttacaaacgcaatgaagatggcaagctagagcatgttggctaccgtgttcgtcaccgttacccagaagaccatccaaaagagcacctacgcggtaagttaaaagacttttctggtggtgttggagatattaaaggtgaactggcaatgttcggttcatggattgctccagaaggtggtaaccgcctattcatctgggaaggtgagatggaatgtgcgacagcaatctatatgacttctcttgcgattaaggacaagtctcgtcgtaagaattactgtcacgtatctgttccatcaggtgcaaacatcaagtctatcaaagataactatcagtacattacatcatttgatgaaatttacttgtgctttgataacgatgaagcaggtgctaaagccactaaagaggctgctggtatcctacctattgagaaggttcgtttattccagtatccagaaggtgtaaaagaccttaatgaatggtggacaaagttctataaagagaaagatacagttctggaaggatttaagcagcgtatctacaatgcacctcgttactgccctgctggtatcaagaactttgcagacggttttgaggcaatgaagaatcgtggtcagattccattgattccttttccagaatctttcggagacttgaacaggctaacttacggtggttacggtttaggtgagattacgactattgcagcaccatcttcagtaggtaagtcagcttacactcgtgagatgatttattcagcttggaaagaaactgattataatatcggtgtaattcctgtagaagatacctatgaagagttgatggaaatgctctgtgcaatccacctgagcaaacagatttctgagattccttatgatgaacgggattgggatgaattaaagggagcacacgcagagctttcaaaaggtcgtcgcatccatatcgttgaccatcaaggggcgattgaccaagataacctgctggagtttgttgactatcttgttaacagtttagactgtaagattattattcttgaccctattacattggctctgtcacgttctgatacggatgaagaggaagtcttgtctgaactattgcgtcgttgcaaacgctaccagtatgcacaggtaaacgtttgtcacgttcgtaagagtgcaggtggtcagaaagctaactctgaaggtggagatatctctgaagaggatattaagggttctggtgcgtatttccagatttccatgaacaacattctgttaatgcgtaacaaggttgacccagaccctgttaagaaaaacttgacaaaaatcaagttaactaagtgtcgtcgtcatggtaagtcaacaggtattgctggtcatacttggtacaatccagacacaggacgtcttatcaaagcttctggatgtggtgttgacattgatggtgcagcagaaaatattcgtcaacagtttggtattggtgaagctgaagaccattatgacgactctttacctcattatgaggatgaagtgtttgaccgtgagactggtgaagtctatactgaagaacagcgtcaaagctcaacgattccacctgtattaagtgaggatgcagatgactgcccgtttgaaactgagtgatagttacaaaagagaggggttcatacccttctttgaagaaaaaagtttaaatgaatttcaggaagagtgtttgacaaaggttgataggttctatagaatgctctacatgaaatgtgatggaggcgttgaggtagaagaaaagttccatcacagtatgataacagtcactattactatacctcgacataatattggttggctgtttataattaaagaaaatgtgtttgaatatcaagtatatcggagaatatcatgaaacactctaaagcatttgaacaagtttttggggattccttaaaagccactgctggtaaaccagcaaaatactatgaagagaagcgtgtaagaactggaaaaactgcacgtaaagcagcttctaaagataagcacaacttccagtaattaatgtttgacaatagagtatcaacaaattagaattggtactcttcataaattgagatagaggtttaaataatgtctaaagttgttaaaatgaaagctccggtagagaagtacaatggtactgaacgtcaaactctgcgttaccttctgaaagatgtttggttttattacctgaacacttcaccacgtccgggaaaaggtaaatccattgataagaaattcccaggcaaagactgcaactacagtgtttcaattctggcagaagatggtaacaagctgtttaaagagtttactaagtctaagaaaaacccagaaggttgggataaagttactactgaagcagttgatgcagatgacttcgaagagaagtttggttgtaaaccaccttttgaagcagacacttactacatcttgaaagtaagtcgtgcagcagcttataaagatggtgctgtatggacagctaaacagtcattccctgtaatgctgattgaagaagtaaatggtaagcgtgtagctgttaaacagccgatgaagaaaatcaaagctcaagcatccgataagcatgaagatgacaagaactatgatgtaattcatccagatattgcagttggtaacggttcttttggtagtgtgattctttctactcacttctacacttttgagaacaatgttctgacaaaacctattcaggaacagtttatcattgatactcttgtaccttacactggtggtaacggtgctaacggtgaacctgaactggatgaagacgaactggctatgcttggtcttgatggtgttgaagataatggtgaaatcactgaagaagacgcaacagaccacaaaccttcgaacaattctgatgatggtgacgatgaagacttgccagacccagatgacgaagaagatgaagacttcgatacagaagactaatctctaaaagttactttaaagccctgtacttagtatggggctttttcatatggagagtcacaatggagaagtatacactaacaaaacttcccgattcagttacacatgtctttattgactctgatagcattgcctataaaggtgcttgtgtagttgagaaagcaaaatataaatatgtcaataaactcacagcagaagaatctgaaccatttgataatgcaaaagatgctgcaagatggttagcagaccagagaatccttgtggaagagcttggcctgacatttgatgaagatgaatgggaaagacagacttggaaagaagctaagagtgaaaaagaagctatcatggctactcagcaggttcttcaggaatggcttaaggttgttggtaaagaaagaacttgggtaggctacttaacagagaagggtgtacataaacataaagacattaaaggtcttgagcaccaatatcaaggtaaccgtaaagatgctgtcacaccaacacacttagttgcttgtcgtgaatatcttctgtcaagaccagagttcaagctcttaaagggaggcttcgaagccgattccatcgtaattgctaaagctgaaaagatgggtaagaaggctgctcttatgagtattgacaaagaccttcgacaagctgaagggacttattgtattgatatgacttatgaaaagtcaccactaatttttattgctgataataatgttggtgatatctgggattgtcctatcaaatcaaaaccaaaagctgcaaaaacagttggtgtaggttttaaatttttgtgttatcaggctgttgctggagataatgcagacaactacttcggccttaaaggtgctggcaaagtagctgtgatgaatgctttagatggtaaagagacctataaagagtgtcttgatgctatctatgaactctatgctaaaaaagagtcttacacctatgtgtcatgggatggacagactgttaccaaaacaccattagagttaatggaacaacatttctgggtagcatatcaagagagaaatccaaaagataatttctcttttaagaaatataattgggagccgtgtatgaatgaagattaaaggatttggcaattgccccacctatggtcattgggtatctttgtgtggggaagttgaccccactaaacattttggctttgtctatttagtatactgtaagaaaaccggacaatattatatcggaaagaaacagcttaatagtgtgaccaaaagaaaagttgctggcaagactcggaagaaggtagtcactaaggaaagtgattggatgacttatgagacttcttctgagtatattaaaaaagatattgagagctttggaaaagaattttttgacttttatattattcaaacctaccacacaaaaggtggtctagtttatggtgaagcaaaccttcaacataaattcgatgtaatgacaaaaaggattgactctaagctcagactcttctacaatgccaatattgcagcaattaagtttattactaaagaaacttatgaagatgctgaaaaaagaatccataaggtaatgaaagcaaactgtgcttgataactattgagagagaataaaatgtttaacaaaagtaaagctgtgagtcatgtagcaaaagttgatagcaagattgaagaacttgagcgcattcttgcaaatgccagagagtcaataattaaagaggttgaagctgttgaatctcaaatgcagcacctaatgcttaaacgtcaagagctacgtgagcatctggaatatattgaaacacgagagctaaaggttaacagatattttaaggagtcagaatgtttaactcaagagaatcagtaaaaaactggaatcttcgttgtggaaacactcaaaagcaaccctacagcaatgagtattgggaatctttgaaatctcaatctctatgtatgcttgaagaagcaaaagagcttgtaaaagcaattgaagagaaagaccccattgagacactggatgctcaggcagatttgcaatatgttcttgacggtttgatttacctgtcacaacatgaccataatggtgctatggaagctgtttgccataacaatgacctaaaatacacagacaactatgaagaagctttaaaacgtcttgcagatattgagaagcgtactggtcaagagtgtatcatcagaatgtcagtagttgatggcaaagaatggtatgcaattgttcgtgcagccgatgggaagattatgaagcaatctaatctccctaaagttcagcttggtgaatacattgtagaacttgaaagccaagaactttttgtggtagtatctgagacatgcgttatctgcaaaggtattgtatgtagcttaaaggatttgggtgtagatggttttgtagaagttaatccaattacctctaaagcagataaagatttctgtaaagagaatggactatggattgcagatattgtctactatgatggtgagcagttccatgtaacctcatacccaaaactgaattatgatgctaataacctgaagtgctggttaaaaggggttggttataatggattcacagaacattaataaagaaggtgtggctcagaagagccacttctcaaactacaatatctctatgacggtgtttatgaatgacccgttacttgagaagtatggtgagactccagatacacttctggataatgaacaagttttaaaagcagttctgtacaaatacgggattgatattgagaaagagtattcttttgaaatctgtcaacacaggaatacttttggtaaagttgtaatggctccactcttcatgggtgtagaaagaactgactatggttggttatatctaaaaagaaacttggagaaataccgtgtctaaagcaaaaaagctatcttatgatgacattatctcaggtgctaaattaggtgttgatagtatcggacaagatgttaagcacggggacacagtcatgtactgtgacgacagaagaggcagaagtgcaatcttgtttggaagagttgtgtgcaagatgcgaggtaattacgttgttgaagacatgaatgtggatgtcacaaaacagcttgaaataattatgaatagtgatatatcatggttcgtgaattgtatgcacacctcttcagtcacaaaggtaagtgataagttttacgatatgtggcagaatgagcaaattttcaagatttaaactagggagcctcttcggaggctcttttcatctgtaggattcaaaaatgattaagacaattaaaaaatcaaacggtacagtagtaagctttgacccagaaagactgaataagtgggcatcatgggcagataagcgtggaatcatctggtcagaagtcactatggaagccatgaaacgtgtctatggaggttgcactacaaaagagatgcaccaagctatgattgatgtttgtgttgataaacaaactcaagagtactcagacatggctggacggctacttctaggaattatctacaaagaagcctttggaggctttactaaggttcctacgctggttaccttcgttaaaaatatggagagagcaggactttgggagaagatggattactcacaggaagagcttgaatacctgcaaggttacatcgtgcactcaaaagatatctcttacggttatgcagtcttgaaacagttcagagacaagtatggtatccgtgatattaaaacgggaagactttttgagtcaccacaatttatgtttatgggtatggctatgaaagcctttgagaagcaaccaaagcaccgtagactgcaagatgttatcaagctgtacacttacctatctgacctgaagattaacgctcctacgccttatttaaacggtttgagggcaactaaatcaggttatgcgtcatgctgcttgattaaggcaaacgatactgctgaatcacttggtattgctgcaaaggttgcttatgatatgactacaaagcaagctggtatcggtatgctgatggagactcgcactattggtgatggtatccgtcaaaacactatcgaacacatgggtaaactgccttattacaagcttgtacgttcatctgtagaggcaaacaaacagaagagtcgtggtggttcagctaataacttctacactgctctagacccgcagattgaagatttactgcgtttgaagcaccctacaacggttccttctaaacgtattaatgagatggactactcattcggcacaaacgattatttctggcagtgtgttcagtatgatacagattggttgctattctcttacaaagatgcaccaaaactctatgacatgttctacacagcatctgctgatgagtttgctatggcagttggtcacgcagtacattcaggagttaagcacagacgagtcaaggctcgtgaaattgctaagctgtttattcaacagcgttatgctacaggtcgtgtgtatccattcttcactaacaacgcaaacacacatacaccatttaaagaaccattgaagatgtcaaatctttgtatggaaattgtgttgccagtgtatggttttgagaaagagacagacctttacagagacgatgctgtgaaagaggatggtgaggtggctctttgcttcctagctagtttggttgcagggagaatttcagaagatgaatacgctgacgttgcttattatgctcttgcaatggttgactccgttattgaccttatggattatccgtatccatcgatgcgcaaccatgttcagaagcgtcgttctgttgggattggccttacaaatgtggctcattaccttgcgaagaactacgtgaactactcttcacgagcaggtaaaacgaaacttcatgaactggcagagatgcactcttactatctgcatgaagcctctctgagacttgctaaagagcgtggcgttccagagtacatgaagttcactaagtatcctgaaggctgggttcctccaaagacagctaacaagaagattgatgaaaagcatgatgcaaaactacgatatgattgggatgacttagcacaacgtatcaaagaaaatggtggaatccgaaactctgtattagaagcttacatgcctaatgagagttcttcactggcaactaatacgacaaatggcttgtacccaattcgtgactttattttaactaaaaagtctgcaactggtaacgtgctgtttattgttccagattatgaagagttgaagtatgtatatgaaattgcttggggtattgacacctttgacctgattgattgttatgcaattgttcaaaagttcactggtcaagctatctcttcagatttctatgttgactacgcaaaagctaagaaggtatcattggctcaagctttgaagtacatgatttatgccaactcggtaggtatgaaaaccatgtactaccttaacagtcgcattggtgtaggtaaatctgcactgcaagatgcttattgcgagggttgtggtgtttagttttaataactatgagggtcgtagaagaccctctaaaaataactttggagagaccatgaaagatttaatagaaaaacatgagcgaccaatatacttgctctacaaaccccgcaaaacattgtactatgtgagcagcacaggtatcatgataaagcagaatgatgacttatgggtcactggagcctcttacatctctacagcagatggtaaaatctacgcaagaccttatgagatgtttaacaaagagaattgggaagttttagacagaaaacaagccttagaaatgataaagaaaggagaaatcacgctatgattaaccagcacccaatctttttaggtggtgagagaaaaacttttgactcactcaataagcactacccaaaaatctttgaactttataaacaacaaaaagcacaagactggtcagaagatgagttcccttttgaacaatcacgtcttgattttgagagtgtcccagcatcaatgtcaggtgtaatgcttgagattcttaagtggcagtgggaagcagacactcaagttgctaagagcttggcatttgcctttgcaccctttatctctgatgacatctatgcaactgcaattatgaagcagtctgagattgaaaacctacatgctcttacttactcagagattgtaagacaatgtattaaaaaccctgaaacaatcttagatgagattaaccagaatgttgctgtacaagaccgattaaaaactgtgaatcgtgttcttgaagaattactggatgaaggtataaactatcgtctgagttatgtgcgtgactcacttctggacaaagaccctttacacttccataaagtgattctaaaagggttgtttgcagtgactgcgcttgaaggtatatcttttatggcatcctttgcatgtacttttgcacttgatgctcaagataaatttcagggtattgctcaagctgtccagaaaattatgcttgacgaaatccttcacactaaaattgatattgaagttttaaaagaaactttaagagatgatgagtggcagaaagcttttcaacaaattcttccagagattaaagtaatcttagatgaagtagttgaaagtgaagagaaatggtcgtattatatcttctccgaaggacgtgctgtagttggcttaaatacaaagcttcttcatgagtgggtttactataatgctgccccactgtatgatatgtttggcattcccagagattttgtagctcctaaagaaccacctttgaagtatatgattaagaagatggaaattgataaagagcagaatgctaatcaggagcaacagaacggtgcgtacctattgaatactgttgtagatgatttgaatagtggatttttagaggttccttaatgacttatgtaatttactccaaaactggatgccctcagtgtgagactgcaaagaattttgcaaaagctcgtggtattgaccatgttgtgagaatgttagggcaggactatgaactatcagacctgatggagattgcacagatgccagttcgtcagatgccattcatcatgaaaactgatggacaaaacctaaaacctgttgggacgctacagaattttatggcagaggtgaataatgcttaaacgcatttgggaaggtttggttgttgatgcaccagcgattgtgattggtatgttgattgttaacctatttactgactttgaacaaggttcattgtttggagccatgttactatgggttatcttcgaaatattagagatacaattaggtatcactgaaaaactaagagaactctttgcgaagttttctaaaaagatttaaaatgaaagggtctcttcggagacctttttagcatgtaaaggggcaataatgaacaaagtacagattattaaaaagaatggctcactcgaagaacctgatatcaaaaaagttttagcagcagtcacaaagtcagctaacagggttggatataaagaactgccaccagatgttacccaagctcttgagtcagcatttatgaggattctggtaaagtccactaaacagaataatttactaatttcggtaaatgatattcacagtattgttgagggtgctttggcagaagtcaatcacgaaatctatgagtcttactcaacatatagaaattaccgtaaagaagttgctcaaaattgggatgagctttaccagaagaccaaagatacactcttcttaggtgacagagagaatgctaactttgacagtagtttaatctctacaaaaggttcaattattcgtggttatctgactaaagaaatctttaaacagtaccatttaacaccggaggaacttgaagccattgaaaaagggtttatctatatccatgatttaagagacctaatttttggtggtatcaactgttgcctgttcgacattggtaaagtcctgaaaggtggttttgaaatgtctggcatcgaatattgtgaaccaaagtctgtactgtcagccttacaggttattggtgatgtagttctttcagcaactgcacagcaatttggtggctttactttagcagagattgataaggtacttgtaccgtatgctaagaagtctctacgttaccatgctgaaaaagcagcatcttacggtattcctaaagaacattaccacaattatgtcatggagcagctacagattgaattaactcaaggttttcagtctcttgaaatgaagctcaatactgtaccttgtagccgtggggattttgcattcacaactttgacattcgggttacttgactcagatatgtctaatgaagataaccgactgcaatacatgattgcaagtactatcctagatgttcgtatgaatggacaaggtaagagcaagaagcctgttgtattccctaaactggtttatatttatgaccagaaaagacataatgagaatatctgtcaaggccacctgtacagtaaagctattgagtgttgctctaaagcgatgtatccagatttcttaagtgtatctggtcatggtgctgtagcagaagcttttgagcgttctggcaaggtaatttcgccgatgggttgtagagccttcttatctccatatcttaatgaggatggggaagagttctacgttggtcgtgctaacattggtgctgtatctttgaacttaccaatgatttaccagtattctaaagagaatggtttagatttctggaaagagcttgataagtacctagaaatgattcgcagcttccacaagaaacgttacgaaatgattgctaatatgccagcaagttctaaccctcttgcatttacacaaggtggtttgtataaaggaactaagaagcctactgacagggttggttgggatattgtgaagtccttcacagcttcttttggggttactgcgcttgatgaactatctgttcttgctgaaggtaaacgacttcatgaagttggaagctgtagttttgcatacgatgttctggaatacatcaacatgaaaactgaagagtttaaaaatgaagatggtttcttatatgcagtctatggcactccagcagaatcactttgtggaactcagctaaaacagttcagagagatgtttggcgttagcaaaggtgtttctgataaggaatactttacaaatagtttccatatgaatgttgcagcagacatcacaccatttgagaagcaggacttagaagaacctttcttccatatctgtagaggtggaagaatccagtatgtaagggtagctaatccagagaacttatcagcacttaagagttgtattacaagagggatgttgaaaggtttctatcagggacttaactttgacttagcaatctgtgaacattgtggtaacagaccaaaggctgatgttgaagaatgtgaggtttgccattcacatgatatctctgtgattaacagggtgtgcgggtatcttggatggactaagattaaaggtgaatcccgaatgaacgatgcaaaaatcgctgagattcgtgacaggatttctatgtaaaacttgacatgagtaaaggagaagaacttttcactggagttgtcccaattcttgttgaattagatggtgatgttaatgggcacaaattttctgtcagtggagagggtgaaggtgatgcaacatacggaaaacttacccttaaatttatttgcactactggaaaactacctgttccatggccaacacttgtcactactttctcttatggtgttcaatgcttttcccgttatccggatcatatgaaacggcatgactttttcaagagtgccatgcccgaaggttatgtacaggaacgcactatatctttcaaagatgacgggaactacaagacgcgtgctgaagtcaagtttgaaggtgatacccttgttaatcgtatcgagttaaaaggtattgattttaaagaagatggaaacattctcggacacaaactcgagtacaactataactcacacaatgtatacatcacggcagacaaacaaaagaatggaatcaaagctaacttcaaaattcgccacaacattgaagatggatccgttcaactagcagaccattatcaacaaaatactccaattggcgatggccctgtccttttaccagacaaccattacctgtcgacacaatctgccctttcgaaagatcccaacgaaaagcgtgaccacatggtccttcttgagtttgtaactgctgctgggattacacatggcatggatgagctctacaaataaaaggtgatgtgggtcttgataggcttacatcacctttttttttttattggatgttagatatggcagatagtattattgggttattcataggttctgtcttactagggttctttttaggactttcttattgtgaattgagagataagttaaaatgtttaagatatcaaaaacgatgatatacatactccacattctagtcttcttctttggggttagtgttatggtatggggtttttcagacccacaatggagtttctcatatcatggtcagatggatttatggtcatgcttcaaaccatttttagggttagctatagcattcagtgcattaccaactaaggtgaaattatgattaagttgagccaaaaacagttagagtggattaaggattacgcctcagagtgtggctcttgtgaaaagaatcacgtaaggtactcaacattccacacggtcttcacattgtatgttggcgacaacgttctaagtgattccgtagtggatggtgtaccgttacctaatgagttacttgacaaattagctgtagttactggaacgtggagtgaagaagatggtcacgacctatctaacgatgttgtcttctacagtcttgaaaatattatgaatccagagtacattatgctaatgacttgtgcacaagactgtgttccattacaaaacttcattaaagagcactgtgaagagtttattactaaacaggttccttgtcaggtagtgtttgaatgagtaaaacaattaaatagtattggtgaggtaactagatgaattacatggagattcgaccatttgacacagctaatggtgaaggggttcgggtaagcctcttcgtagctggctgtaaacatcactgtgaaggctgctttaacagggagtcttggaagtttaatgctggtaaagagtttacttatgcaaacctctacggcatcattaagttaatggatgataaggccattagtggactgtcaatacttggtggggagcctctggatgatagaaacattcaagaggtcaccaacatatgcaagcgtattaaaactgtttatccagaaaagtctatatggctttggacaggttttcaactgcacgaaaaaatccacttagatgtgatgaaatatgttgacgtggtgattgatggtaagtatgattcatctaaaccaacagttaaaccatatcgtggttctgataaccaaaacctctggagaaaagagtatgggtggcaaggtgattgtcagtggagagccgagtaagtctcgtcgtaaagtaggttatcggtaaaggccactttacaatgtgctacagaacaaacttaaccgttggtgtcactgaagaagaacttaaagcattttgtgaaaagattgagagagatacgaaatgggaatctggaacagttttaaatcaaaagtaaaagcagcactggcatcactaggtatgctcactggtgttgatgtgactcatctcatgcagcacttcaagatggatgagaaactagctaatgagattatgaaaagtatctatgtaggccgtggtaaaggtggtaagaaacaagcacatcgaccaactggtgcagcagctattaaacgggcagctaagaaagctcgtaaccgtaaacgtaataagaaggctaaataatcatgagcaaagtttataacactcgtaaattacagattttcgtactgtgccagtttatggctaaagagtataactgctactactgtggcacagggttcatcagtgacaatgacggctcatatctaccgttcaaagaggctgtaaaactcttcaatgaagaagtaagctctaagaaagatatcgaaaaggttaagctaacctacagtaagaaagataagaagattatctgcctagataactttgtaaaagttactggagaagcaaaagagtttatggatgagagtgagatttcattcacaagcatcttgaaagtagctcagtaaacagatactataagggaactgcaaaggttccctttttatttttggagataacatgtatctgtcaaatctgaaacgttcggctgcaatgtcagttctaagactcagctttgaggaacgtcaagagttcattgactcccaccaatacgacccttctaactctaaccgcatgattctctggaatcgtgatagtactcgtgaaagggcactattccgctattacccacattacaccatagataacctgtatgaatgttttgttgtgaagaacactatcacaattctcaacaaactttgcagatacacaggtaatcaatccttcacattaggtcaccacaagcctgttacaaaaggtggtgaacatcactgtgcaaactggtttatccagactaaacttgataaccagaagcaaggcgatagtcttttaagcacccctaagatgacctatgaagagcaagagaaatatatcaaaaataatatgccagatgtgcttgacaacagctatacagatttggcaatatctctcctgttgaagttcgagacagtttatagggcaacttacgatggctagaacagattgggaagtaaaagaacttgtaagtgatgctggaaatggctgtgaggtgtatatgattcgtggccatgtgccagacccattagctattgagatgattgaccatcacacaagtggattctacaaagaactcggtgaaccaagtgttgaaagaacttggacaaaaccagtaccagatagcacaggtaactgttcagtaatctatcacattgtgaatccacaaaaatgcaaaacagctatggctgtgacattcgtaacttttgattgagagagaaaattatgaaaactattattgaagccgttgtcaccgcacaagagaaattcttccacacagaaaaatttaatatcatccaatttccatctggagaaattggtggaaacttctctgaagactttgttaagtttactgagcgtaatgctggtaagattgacaatgttatattgactgtgcagggatatgataaagatacactgtttgcattagctttggctaaggatgccgttgacagtcttgttccatacaaatcagcgatgaaaaccgttgttttcgggttcttaccaaatgctcgatatgaccgccatatgttcaaaggtgattcagcagcactgaaagcttttgccaacctcgttaatgcaatgggctttgatgcagtgtgtgctcttgaccctcacagtaatgttgcagaaaatttatttaagtgctttcagagcatgaagcaaaaagatgtagcagcacactttgcaagtgacccacgcattgatttcttggtagccccagatgcaggtgcagctaagaagactgaagagactgctaaagaggtagataagccatatattacaatgtctaaagtacgcaaccttaagactggtgaaattactggtatgcgaatccttgatactgttgatttgaccgataaaactgtcatgattcttgatgatatttgtgatggaggccgaaccttcatagaagcagctaaacatcttcgtgaagcaggtgcaaaacgtgtggaactctatgtaactcatggcattttctctaaaggtgttgaaaacttacttgacaatggtgttgaccatatctacactacaaactctttaggggaagctaaagaccgtggcttaacacattatacccaagttactgtagtaaccattgattgaaactttataggggcttcaaagccccattttgagagagattaaaagatgactaaatcactttatgcagtaccagcaggtttaaacgcagatgcttacaaatctggtcacatttaccagtaccctagtgcaacagaatacttgatgttcaatctgacaccacgtagtgataagtggttcaacagccccttagcaattgatggtgtagtcgcttttggtattcaacgttttgttaaagattacctgatagaccactggaacgccaccttcttcgaacgtgacaaaaaagaagcaattgacgaaatcttagaagttatgaacggtgttctgggtaaagatgctattggtcgagaacattgggaagcactccacgacttaggttatctaccagttgaagtctacgctgtagaagaaggcacagttgttcctatgcgtgtaccaatgattgtcttccagaacactgtttcaggtttccattgggtagcgggatatctggaagatgctttctctgctgagatttggaaggcttgtaccattgcaactattgcattgcactacaaacgtatctgtaagaagtggtctgaccttacttgtgacaacgacttacatttgccttatcagtgccatgactttgctatgcgtggtatgtccggctttactgatgacgcatttaacgctgtaggtcacttaacaagctttaaagggactgatagcttccctgcggtatatacagctaaacgcatctatggacagtcctatccaatctctgatattggtagctctgtaccagccactgaacactctgtaatgtgtgcaaacattgcttgggaaggtggtaatgagttgattgaagaagaaagacgcttcaaaggtgagttacaaaccttccgtcgcttcttaacagaaacttacccaactggtattgcaagtgttgtttcagacacttataatttctggagaactgtatcagtaatactaccagaactccgtaaagagattatggaacgtgatggcaaactggtaattcgtcctgactctggagaccctgtacatattgtcacaggatataaagcaattcacttagagtgtgctaaaaaggcttattacgaacacctaagcaagcagaatgccagtgacacaatgttgagcaccgtcctgaacatgaagcttgaagatattaactatgttatggctgggtggttacgtgcagaaggctatgaaatggtggttgacagagaagactttgaagtagccgatacagtgttgctgaaagatgcttacatcaacggctctgcaaacgttgtaacacgtcctgtagcggagattgatggagctattaagacactgtacaacatctttgggggaactattaactctaaagggtttaaggtactggatgagcacatcggccttatctatggtgactctatcacgctggaacgtgcaaacgaaatcctgaagcgtctgtatgaaatgggttttgcaagctctaacgtagtgtttggtgtaggctcttacacttaccagtacatgactcgtgatacctttgcatttgctgtcaaagcaactcttgcaagcattggtggtaaagagattatgcttgcaaaagaccctaaaacagatagtggtgttaagaaatctgcttttggtggtgtagcacccatgtgggatggcgaaaagctgaaagctgtagatggctatgggttccagagctttgcagatgtacttgaccacccagcttgtgctttacgtctagtctttagtgactctgagcagttcggctacacaactcttggtgatattcgaagtaatattgacaagcagctttaaaagtatatgataagaggctcctacgggagcctttttaatttctggagaatattatgaaaatcaaagagatgaacatcaacattgtcttagaagaacgttgggagaacatcaagaagcctgaagatggtcataagttccttaacaaaatcttagtagcagctaaagaggaactgactggtaagattgcagcagcaatcacaataaaggtttgtgtaaaaggtcttccagacaaccaccaatttgcacttgacgagtttaaagaaagcttctacaatccaaacaaacagatgcttgaaagtaactttgcagtgtctacaagtatcgtccatgacagaagctttatcctttacaagaatatgagaggtgagtcatgcaagcatattggatagaaattttactgtcacttggcagtgtagcagtctttgtttaccttctttgcaagtactatgcagagcacaagaagtgtgattactgcaatggggaagggtatacaagagcaggttgttgccctatgtgtggcggttctggtaaaatgtttaataagtaattcaacagtaaactaagaggaaagtattatgcgcatggtaaacgaccacgcagaagtgattaagagttcaacttctttggagacatctcaagcacagattacaatgacacctgaaatgttcagccttctgagttctggtgtatacacatttaaagaaagggcagtgattcgtgaactgtcatgtaacgcagtagatgctcagaaagaagctggaagagagaacatcccgttccatgtgcatttacctactcgttttgagccttactttgaagttcgtgattttggaactggattgactcatgataaagttatgagtttgtacctaaactacggggcttctacgaagaatgactctaatgattacattggtgcaatgggtatcggctcaaaatctccatttgcaattgctcagtcattcacagtatctagctatgttgacggtgttgttaataagtactctgtttatcttgagaatggtatccctcaagtaactaagctgacaactaacccaacaaaagaacctaatggtttagctgtacgtgtggcagttgctgaccaccgtatctcaaagttctttgaagaagctggtaatgtatactcatactttgctgtaaaaccagaaagtaatattgtgtacgacgatgtattagcagatatgaacgtcattgcccgtgaagagggtgtttatgatgccatgattcataagcaaagttggcgttctagtggtaacaggacagagtttaatgtggtgatgggtaacattgcctaccctgttaacatggaagcattacttggtgatgacttcttcaaagtattgccagaatttttccgtaggagcgtagaccttgtaaacatctacatgcctattggttcagttgctattgcagcttctcgtgaagcattgcagatgaatgacacgacaaaaaatgttatcattgaggctactaaaaagataactgaagccattacaaaggatgttatcaagaaagttaatagccaacctacactcatggatgctgcacaggcttatgctgagttacgtttgaactcacgagagatgtttaatgctgtgtgtccaaagctagagtggggaggcgttaagcttgattctctggaagaagaattgctaaacattcgtcgtgggattatctacgcagaagacggctcagtcatttatgaacgtgatggtaaaggtaatattaaggttgacagtaaaggaaacaacattcctaaagtggactacctatacaatccagttgcttatgtcaagttcaactctttagagagtaagattcgtgcaacagcactttcctacactcaagaggcaagtatgttcaatatctttggtgcaatgcgtaaaagccaaattgaacagtttttgttcgtgattaatgaccgtcgcaataaaaacggtactgagaagactgtaggacgcaatcaaattttgcgtggtgcatgtcgagactacgccagtgagtcaaatctgtttcacagatacaatggtattgtctttgtattctcgactgaaaaagagttagatgatttaatcaatctacacaaacttgataaaagcttgttaaagattgtgaagatgtctgataaggaacaccactatcagcgtaaagaagctgtaaggggtgttgtaaaactctggaaagctgttccagcagaaactaaagcttcatacaaagaggtgtcagaagacttagacacaattgaagagcctcagctttatattaaggcagtaggtgacacagttgatggtagatgtttttgctcatctccagaggatgtagctaagtcagttgctaatgttacaggcaagacagtctatgttttccgaaaagcaaattggaaaaagataccagaagactggattgaagtagatgagaagctcttgaacgacagcttaactgatgttcattggattaaccataacaggtatatgacacgcatctacatggatggtgtcctcgaccttacaagcagttggattattgccagaaactttacgttcaataacaggaagatttctcgcgggtattgttattcaagggatactattaagacaatcttcttagaagggaatgaagatgctgttgaggcaatgttcggtaagattcagtatgtggctgcaccgtttgcatacacttacactatcagtgttcttcaggatttgaagtcatgccttgataatgacacaaaactgtacaaaaagattaaaaaagcaggtgaccgcatggttatcaagctgacaaactatctttcaaaaagaaaacaagaaaacttcttgctttcacacttagattggaataaagtatcacctatcgaagtgagtaagtttttaggctttaatgtgaaatgtgttccagaaggtacaacaatttacgattaaagtgtttgacaaggggctttgaagccccttagaatagcctcacaaattgattgattaactaacaagagagagtaataagatgactactaaaactaaagcacagattgacgcagaaatttacaaactggttaaagaaggtaagctgactaaaacagctattgcacagaagttcaatacttcaacccgttcagttggtcgtgctgtagagcgtcatgaagcaaccttaaaaggcaagaagaaggcaacttctacaccagctacgaagactttgaaacaagttgctaagacttttaaaaagaaagctggcaaaccagttgaaaaggtcgttaaagacactgtacagaaagctccagtaaataaactgcacgaagctatgcagaaagatgacaagattgagtacatgattactggtgattctgtaattatgacttatggttcagaatctgaaattgttgagtctactcatccgaactatcaagagattgtagttcatgttgtgaaaggtgagttcaagaaagcatttgaactgatgaacattcgtaagtctatcgaaaacttcactcagggtgctatcacaatcaaaggcgacaagctattctacggtgctgttgagatgcgttctactctggttgaccgtattcttcacatgatgaaaactggcgataaaggttttgaacgacttgtaatgttcttcgaaaaactgatggaaaacccatctaaagattctgtagaacaactttggggatttgtatctcaccttgatgttgaaattgatgaagaaggctacatcattggttggaagaaagtctctactcgtgaaggcaagctggttgactctcacacctacaaagtgcctaatgatttgggtaacattgtagaaatgccacgttggatggttgataataaccgtaacgtaacttgctctcaaggtcttcatgttggtgcttgggattatgttcgttgcttctcaggtgatacaatcctgaaggttcgcgtacatccacgagatgttgtatctgttccaactgattacaatgatatgaagatgcgttcctctcgttatgaagttgcagcaatcgttgataatcaacgtaaagtgctggaagcatgggacggtaagactgaagctttgcatgtcatcgttggcactgctggtgaactcatctctcaacgtaaacgtgaaatctaataagtaatttcttaaaaggctgcttcggcggccttttttatttgtattttgtgcagagtgctgtataattgatgtcacgataaactaaacaggagaaccaatgaagaaattgattctaggtttgtgcttaatgtttacagcacacttatcttatgcagttgactgcccagagctatcaattagtcaaaaagtaaacatgttaaaagcttaccagtatggtgagaataatatggggaaaggctggggtattactctagcagctatagccttacaagagtcagagttaggtctgaaggtagagaataaaaagacccacgactatggtattttccagaatcacttgaagactgttgtaaagcgtaacaaaattagtcctaatgtggctaaaaagaaactcttaaaagactttgactatgcagcaagagagacacataaagagcttgagttttggactaaggtacatggtcacccaaagtcaaagaagactttacaaaaagttttagcatcatataatgctgggtattcgtacaaaatccctaaagctaagaaatactctcaagatgtctataacaatatgaaagttatcgctcaatgtgaatttgcaacaaacatttctaaggtaaatcatgaaaaaattaagaaagtctgatgaagtcctgtgccatgcttacgacttgcaccctcatgagttaggtcttgattcctgtgtatggactccagaacagtgcagggattttgaagatactgcaagagaagttgtatgttcacttgaagagttccacacatcagaaccaattgtgagcgttgtggacaaagagactggacaaactgtaggtgtaaggcgtgacagcttagtcatagtcaataaagaccttgtagaaaaaggtaaccttatcttagcagatattgatggtgttcttacaaattttaatcacgaagattgctcaacggaattgactgatgggtcattctcacagtacactaatcttcttgactctgtaagagcaaaaccaacatatgtttttagtattattgatgcaattgctaatcatgctgccattggactcttgacagcgagaggtgaatctcagagaatacctactgagatgtttttaaggcataacatagagcatgattacatgctttttatgcgtggttttggaactaactctataagtgcagaaagtttaaaagtgaggatgattcagtcttgcattcttccttattttaatatagtatgctttatagaagatacagagaagaatgttcagaaggtaaacagaatccttccacacattaaaaccatgttagttaaacattgagagaaaaacttatgaacaatatcattacggtagcactggacgatacggcaaacaaatctgaagtagttcgtaaaatgattcaaggtaactttgaaggtaaaattttccgtgctgttaatgtaaaagctgatggcagtattcgtgaataccgtgcattgttgaatgttaaaaagcacgtaaaaggtgctggttcaacgactgcacacaaagaaaacctgatgactatctatgatatgggtaaggcttcagagttaggtgctgaaggtatcgttaaagaaggtgctccgtatcgctctttcaatctggaaactactcttatgctttcctttacgagtggttctaaaacaatcacttatctctttactgatgctgcaacggtatctgctattaaggatagcactgtcaaagctggcgtagttgctgctgcaaaagcttcttcgatggctgcgaatatccttgctaaagtcctcggttaaggttaagatacaggctccttcgggagcctttttcatttcaggagattgttaaatgacatttaaagagttctgtcaagctactttcataattgttttcttagttggtgcaggtgtctggggaggatactcttacagagactatcaagttgctgaaactgagctaaataatgagaaactaataagtgttgctaaagatgcttatcaggaaggtttagccacactcagcaccaattacaaaaatgatttgaaagatgtgcttgctaagaataagcatacaaaagaggtactaacatatgaaaaaactaagccagagttttataatgtttgtgctactgataactatgtcagggtgttcaacgaacaaagtgaacagtacattcaaaaactcccaagtaagtgagagtgataagtacactcaagaagaatcacggtatatcatcaaaggcaacacaggcagtgatgtagcagcagcccttgagttctatcgtgacggcttttaccagtgcacaatcaaagctaacaaccttattgacatgattttattagggaataagcagcaatgacagagaatcaagatactttctatgtagaaggttacttactgttgccacgaccaaaagaaacttatatgcgaattgatttcttaccaaccattatggataatgtgatgtgccatatctttatgcaaggtgtcacagcacagcttaagcatgttggtaaagagtgcaaaataaaggttgacactcatccagaaatcaaagagaatcactacacatggttcttaccagactctaaagaaatcttagcagttcttaaaacgaggaagtaactatgcagattaatggaagagactttgtagccgtttactacgagaaaggtaaagaagttggcgtagcacaagtgtcttatggcaatggtaagtggctatatggaacaatcgcagtagttggaacaagaagtgatacaaaaacttttaaagattgtgttgaccttcttgaagaatccattcagaatcattggtgtctgatatggatgactgacaatgaagtgatagaacgcttcaaaaagattgatatcaacattgatagtattgagcatgttgatttatatgagctaactgagaaggtaaactatgagagtaattctagccagagataaaaagacacggaaactcatccggtcagcagtattcattggaagaaatgaagtcatcccgtttacagcaaacgatgtgatagcctacaggaaaaacttagtatttagtgattgcttgcgtggcttcatctcccaaccgttggaagactttaaaagccgttgtggtaaaggtatcatcattcaagaggcaattatcaatggctgacttctgcaaagactgttctatagaaatgtttggacgtgatacaggtgacttaaaaggtcttatcactgaagatgactttaaagctggctacgcaatgccagtaatctgtgaaggttgtgggtgcatctgggtagaccacgaaggacagcgtgtaaaaccttcagaagataaagaatcttgggagagatgttaaatgggtattgtaaaaatcatcaaaggtgatatctttgatgcctttgataaaggcaaatttgatatcattggtcatggttgcaactgtatgaatttcatgggtgcaggtattgcagcaactatttctaagcgttatccaaaagtgtatgatactgacacagaagtttacctgtttgcaggtggcattcgtcacaaaccctgtgaaaatttactaggtaatttctctgtagcacgtttaaaacaaggccgtatagctaacctttacacccaacttcatactggtaaagatgcccgatacagtgctttagagtcatctttgaaacagcttaacagatactgtgaagttaaccagttgaagaaagttggtctacctatgattggtgcaggtatcggtgggcttgaccctcaagctgtcacagttatcattaatcaggtgatgaagagtgtagatgtttatctgtatgtctatgaagcaaaaatgtataatgagttacactcaggttggaaaaactactgtgaaccagaatactttgcaggtgtagttgtgttcacagataacgaagttaccctcttcagacgaagaaaaggtaagatacatcaaagtaaccctccggttgaaaagatgtctctgagtaacgctctagttacccacctgtcgaagagcaatcacaggattgcagtaacatttggcagtgatgcagatacttatatctatgcaagaactgatgaggatatcgagacagttttctcttcgccagaagttaccttcttagacgcaaagaactaagaaacttcgtaggatattcacaatagactaagcctttcttatctggtaaatttttcaggtaaggagggctttttcatttcagaattgtgcaggtatatttctatagagaaatctgtagaggaaattttgaactccaaagagaaaattcattttcaaactgtgcaggtaatctccaaagggttttttcattttcaaaacgtgcagagaaaaatcaggtcgggcaagaaaaatcattttagatttgtgcaggtaggtttttatagagagccagaccaacccctctccccctcttactccccctctccccaaaagtcaagagaaaaatttgtagcggattgaaaaataattcttgatttgtgttctgttttgtggtagtcgtgtgcgcccgtttcattacagttttgccaaaaatatttttaaaattttttcttgactctttgaacgtggttatctagtatttgcatcaacggggagggaatgaccttccccactaaataaagtcctaaactggagattcaaaaatggcatatcgtgcacctaaattcatcaacaaagacaactttcgcaacgcactggagaagtcacttgatgaaaattttaaaggcaacattatcgttgttcacgcattcaattttaagtatgatgtaaacgggaatagaatcaaccatta
